(19) United States
(12) Patent Application Publication
(10) Pub. No.: US 2005/0266399 A1
(43) Pub. Date: Dec. 1, 2005

(54) HCV regulated protein expression

(76) Inventors: Peter Berndt, Basel (CH); Peter Michael Kilby, Wokingham (GB); Paul Rugman, Quorn (GB)

Correspondence Address: HOFFMANN-LA ROCHE INC.;PATENT LAW DEPARTMENT, 340 KINGSLAND STREET, NUTLEY, NJ, 07110, US

(21) Appl. No.: 10/878,556

(22) Filed: Jun. 28, 2004

(30) Foreign Application Priority Data
Jun. 30, 2003 (GB) 0315248.5

(51) Int. Cl. C12Q 1/70

(52) U.S. Cl. 435/5

(57) ABSTRACT

The present invention relates to novel host cell targets for antiviral, preferably anti-hepatitis C virus (HCV), compounds identified by analysis of HCV replicon-regulated polypeptide expression, to prognostic markers for the prediction of the outcome of a viral infection, to in vitro methods for the prediction of the outcome of a HCV infection in a subject, to screening methods for identifying compounds which interact with and/or modulate the activity of the novel host cell targets or which modulate the expression of said novel host cell targets.

### BACKGROUND OF THE INVENTION

[0001] Hepatitis C virus (HCV) infection is a rapidly increasing public health problem, with an estimated 200 million chronically infected patients worldwide. No vaccines are currently available (Hagedom, C. H. & Rice, C. M. eds. (1999) Current Topics in Microbiology and Immunology (Springer, Berlin)) for HCV, and only a subset of patients responds to current treatments. The mechanisms of viral infection, persistence and clearance are not well understood, mainly because of lack of adequate animal models and cell culture systems.

[0002] As the propagation of the virus in cell culture has been unsuccessful (Tan, S. -L. et al. (2002), Hepatitis C Therapeutics: Current Status and Emerging Strategies, Nature Reviews, Vol. 1, 867-881), a HCV-replicon system, in which expression of the HCV non-structural proteins drives the replication of a subgenomic HCV RNA (Bartenschläger, R. (2002), Hepatitis C virus replicons: potential role for drug development, Nature Reviews, Vol. 1, 911-916) has been generated. With this system in hand, HCV replication and host-all response can be studied in greater detail. Although most of the current antiviral efforts are aimed at key viral enzymes that are essential to HCV replication, cellular genes that are required for HCV replication represent an attractive class of genes for targeting to control viral replication, e.g., with small molecules.

[0003] mRNA viruses are totally dependent on the host cell for protein synthesis. They have to subvert the host cell protein synthesis machinery to a significant degree in order to express their viral proteins. Not surprisingly, parts of this process are already described in the art. Thus, Krüger et al. (Krüger, M. et al., Identification of eIF2Bγ and eIF2γ as cofactors of HCV IRES-mediated translation using a functional genomics approach, PNAS, 2000, vol. 97, 8566-8571) used a functional genomics approach to identify eIF2Bγ and eIF2γ cellular cofactors involved in HCV IRES function.

[0004] During viral assembly, mammalian viruses are dependent on the host-cell glycosylation machinery for morphogenesis and secretion. The first step in the N-linked glycosylation pathway is accomplished by the ER-localized glucosidases, which may be targeted at a low level to treat viral infections without compromising the host. Su A. J. (Su A I, Pezacki J P et al, PNAS, 2002, 99(24), 15669-15674) showed that among the host genes induced in HCV infection were several involved in the immune response and induced by IFN-γ as CD8, MHC Class II components, chemokines as RANTES and MIG. Other genes identified that were differentially induced or repressed during early HCV infection were associated with lipid metabolism (prognostic markers of outcome).

[0005] However, it is well known that regulation on the transcriptional level is not necessarily indicative of a similar regulation of the expression of the respective gene on the translational level. Several studies have shown that mRNA expression levels and actual protein expression are only poorly correlated (Gygi S P, Rochon Y, Franza B R, Aebersold R., Mol Cell Biol., 1999, 19(3), 1720-30).

[0006] Therefore, there is a need in the art for novel host cell targets in the treatment of a HCV infection, as well as for markers to study and to predict the outcome of a HCV infection.

### SUMMARY OF THE INVENTION

[0007] The present invention relates to novel host cell targets for antiviral compounds, preferably anti-HCV compounds, identified by analysis of HCV replicon-regulated polypeptide expression, to prognostic markers for the prediction of the outcome of a viral infection, to in vitro methods for the prediction of the outcome of a HCV infection in a subject, to screening methods for identifying compounds which interact with and/or modulate the activity of the novel host cell targets or which modulate the expression of said novel host cell targets. The polypeptides as listed in Tables 1 and 2 are down- or up-regulated by the presence of HCV replicon-derived RNA and it is accordingly possible to use them as novel targets for viral drugs, and as prognostic markers for the prediction of the disease outcome.

### DETAILED DESCRIPTION OF THE INVENTION

[0008] The present invention provides a target for an antiviral compound comprising at least one polypeptide selected from the group of polypeptides as listed in Tables 1 and 2. Preferably, a target for an antiviral compound comprising at least one polypeptide selected from the group of polypeptides as listed in Table 3 is provided. The polypeptides as listed in Table 3 comprise up- or down-regulated mRNA chaperones, mRNA-binding proteins such as, e.g., PTB. Also preferably, a target for an antiviral compound comprising at least one polypeptide selected from the group of polypeptides as listed in Table 4 is provided. The polypeptides as listed in Table 4 comprise up- or down-regulated translation initiation proteins such as, e.g., eIF2γ and eIF2Bγ. In further preferred embodiment, a target for an antiviral compound comprising at least one polypeptide selected from the group of polypeptides as listed in Table 5 is provided. The polypeptides as listed in Table 5 comprise up- or down-regulated polypeptides involved in lipid metabolism, e.g., polypeptides involved in cholesterol synthesis and β-oxidation. In another preferred embodiment, a target for an antiviral compound comprising at least one polypeptide selected from the group of polypeptides as listed in Table 6 is provided. The polypeptides as listed in Table 6 comprise up- or down-regulated polypeptides involved in signal transduction pathways, e.g., MAP kinases as MK01 or oncogenes as SRC8. Preferred are the above-described targets as anti-HCV targets. The target for an antiviral compound, preferably an anti-HCV compound may comprise two, three, four, five, six or even more of the polypeptides as listed in Table 1, Table 2, preferably in Table 3, in Table 4, in Table 5, and in Table 6. Especially preferred as targets for an anti-HCV compound are the polypeptides of SEQ ID NO: 70 (PTB_HUMAN), 101 (NR54_HUMAN), 72 (ACDB_HUMAN), 193 (CHR1-O14805), or 166 (SCR8_HUMAN). The antiviral compound as used herein may comprise compounds against any virus e.g. DNA and RNA virus, preferably they comprise compounds against RNA viruses e.g. HIV, poliovirus. Most preferably, the antiviral compounds are compounds against HCV.

[0009] The term “polypeptide” as used herein, refers to a polymer of amino acids, and not to a specific length. Thus, peptides, oligopeptides and proteins are included within the definition of polypeptide.

[0010] The present invention also provides a prognostic marker for the prediction of the outcome of a viral infection comprising at least one polypeptide selected from group of polypeptides as listed in Tables 1 and 2. Preferably, a prognostic marker for the prediction of the outcome of a viral infection comprising at least one polypeptide selected from the group of polypeptides as listed in Tables 3 to 6 is provided. The marker may comprise two, three, four, five six, seven, eight, nine, ten or more of the polypeptides selected from the polypeptides as listed in Tables 1 and 2 or as listed in Tables 3 to 6. Preferably, the invention provides a prognostic marker for the prediction of the outcome of a HCV infection. The outcome of a HCV infection may comprise hepatic failure, hepatocellular carcinoma and liver cirrhosis (Hofnagle, J. H., Hepatitis C—the clinical spectrum of disease Hepatology 26, 1997, 15-20).

[0011] The present invention also provides an in vitro method for the prediction of the outcome of a HCV infection in a subject comprising the steps of obtaining a biological sample from a HCV-infected subject; and determining the expression level of at least one polypeptide from the group of polypeptides as listed in Tables 1 to 6. The term “determining the expression level” as used herein refers to the quantitative determination of the expression of polypeptides in biological samples from an HCV-infected subject. Moreover, the in vitro method further relates to comparing the expression level of the at least one polypeptides from the group of polypeptides as listed in Tables 1 to 6 to its expression level from different time points in the course of the HCV infection and/or to the differences in expression to biological samples from uninfected subjects. Methods for determining the expression level of polypeptides in biological samples are well known in the art and include, but are not limited to, Western-blotting, ELISA or RIA. Antibodies recognizing the polypeptides listed in Tables 1 to 6 can either be generated for the purpose of detecting said polypeptides, e.g., by immunizing rabbits with purified proteins, or known antibodies recognizing said polypeptides can be used. For example, an antibody capable of binding to the denatured proteins, such as a polyclonal antibody, can be used to detect the polypeptides of this invention in a Western Blot. An example for such a method to determine the expression level of a prognostic marker is an ELISA. This type of protein quantification is based on an antibody capable of capturing a specific antigen, and a second antibody capable of detecting the captured antigen. A further method for the determination of the expression of a marker for the prediction of the outcome of a HCV infection comprises analysing biopsy specimens for the presence or absence of the markers of this invention. Methods for the detection of these markers are well known in the art and include, but are not limited to, immunohistochemistry or immunofluorescent detection of the presence or absence of the polypeptides of this invention. Methods for preparation and use of antibodies, and the assays mentioned hereinbefore are described in Harlow, E. and Lane, D. Antibodies: A Laboratory Manual, (1988), Cold Spring Harbor Laboratory Press.

[0012] For the methods for the prediction of the outcome of a HCV infection of the present invention, suitable biological samples need to be analysed for the expression of a marker. Said biological samples can be serum, plasma, or liver tissue. Cells from liver tissue can be obtained by, e.g., large-bore needle biopsy.

[0013] In the present invention, the term subject comprises any mammal, which may be infected with HCV. Preferably, the subject is a human being.

[0014] The present invention also provides a screening method for identifying and/or obtaining a compound which interacts with a polypeptide selected from the polypeptides as listed in Tables 1 to 6 whose expression is up-regulated or down-regulated in HCV-infected tissue comprising the steps of contacting said polypeptide with a compound or a plurality of compounds under conditions which allow interaction of said compound with said polypeptide; and by detecting the interaction between said compound or plurality of compounds with said polypeptide.

[0015] The “interaction” in the screening methods as disclosed herein may be measured by conventional methods. The type of conventional method for testing the interaction of a compound with a polypeptide that is soluble, as opposed to membrane associated, can be an in vitro method using either purified recombinant polypeptide, or native polypeptide purified from cells that endogenously express the polypeptide. As a non-limiting example, a polypeptide of the invention can be bound to beads or immobilized on plastic or other surfaces, and interaction of a compound with the polypeptide can be measured by either using a labeled compound and measuring the label bound to the polypeptide, or by displacement of a labeled known ligand from said polypeptide.

[0016] For polypeptides that are associated with the cell membrane on the cell surface, or which are expressed as transmembrane or integral membrane polypeptides, the interaction of a compound with said polypeptides can be detected with different methods which include, but are not limited to, methods using cells that either normally express the polypeptide or in which the polypeptide is overexpressed, e.g., by detecting displacement of a known ligand which is labeled by the compound to be screened. Alternatively, membrane preparations may be used to test for interaction of a compound with such a polypeptide.

[0017] Interaction assays to be employed in the method disclosed herein may comprise FRET-assays (fluorescence resonance energy transfer; as described, inter alia, in Ng, Science 283 (1999), 2085-2089 or Ubarretxena-Belandia, Biochem. 38 (1999), 7398-7405), TR-FRETs and biochemical assays as disclosed herein. Furthermore, commercial assays like “Amplified Luminescent Proximity Homogenous Assay™” (BioSignal Packard) may be employed. Further methods are well known in the art and, inter alia, described in Fernandez, Curr. Opin. Chem. Biol. 2 (1998), 597-603.

[0018] The method for identifying and/or obtaining interacting compounds may also be carried out by specific immunological and/or biochemical assays which are well known in the art and which comprise, e.g., homogenous and heterogeneous assays as described herein below. Said interaction assays employing read-out systems are well known in the art and comprise, inter alia, two-hybrid screenings (as, described, inter alia, in EP-0 963 376, WO 98/25947, WO 00/02911; GST-pull-down columns, co-precipitation assays from cell extracts as described, inter alia, in Kasus-Jacobi, Oncogene 19 (2000), 2052-2059, “interaction-trap” systems (as described, inter alia, in U.S. Pat. No. 6,004,746) expression cloning (e.g. lamda gt11), phage display (as described, inter alia, in U.S. Pat. No. 5,541,109), in vitro binding assays and the like. Further interaction assay methods and corresponding read out systems are, inter alia, described in U.S. Pat. No. 5,525,490, WO 99/51741, WO 00/17221, WO 00/14271 or WO 00/05410. Vidal and Legrain (Nucleic Acids Research 27 (1999), 919-929) describe, review and summarize further interaction assays known in the art which may be employed in accordance with the present invention.

[0019] Homogeneous (interaction) assays comprise assays wherein the binding partners remain in solution and comprise assays, e.g., agglutination assays. Heterogeneous assays comprise assays like, inter alia, immuno assays, e.g., Enzyme Linked Immunosorbent Assays (ELISA), Radioactive Immunoassays (RIA), Immuno Radiometric Assays (IRMA), Flow Injection Analysis (FIA), Flow Activated Cell Sorting (FACS), Chemiluminescent Immuno Assays (CLIA) or Electrogenerated Chemiluminescent (ECL) reporting.

[0020] The present invention further provides a screening method for identifying and/or obtaining a compound which is an inhibitor or an antagonist of a polypeptide as listed in Tables 2 to 6 whose expression is up-regulated in HCV-infected tissue comprising the steps of a) contacting said polypeptide with a compound or a plurality of compounds under conditions which allow interaction of said compound with said polypeptide; b) determining the activity of said polypeptide; c) comparing the activity of said polypeptide in the presence of the compound or the plurality of compounds to the activity determined in the absence of the compound or the plurality of compounds; and identifying and/or obtaining an inhibitor or an antagonist, wherein a decreased activity determined in (c) is indicative for an inhibitor or antagonist. The terms inhibitors and antagonists as used herein are used interchangeably. The screening method can be performed either as an in vitro assay, or as a host-based assay. The host to be employed in the screening methods of the present invention and comprising and/or expressing a polypeptide listed as in Tables 2 to 6 may comprise prokaryotic as well as eukaryotic cells. Said cells may comprise bacterial cells, yeast cells, as well as cultured (tissue) cell lines, inter alia, derived from mammals. Furthermore animals may also be employed as hosts, for example non-human transgenic animals. Accordingly, said host (cell) may be transfected or transformed with the vector comprising a nucleic acid molecule encoding a polypeptide which is differentially expressed in HCV-infected tissue as disclosed herein. Said host cell or host may therefore be genetically modified with a nucleic acid molecule encoding such a polypeptide or with a vector comprising such a nucleic acid molecule. The present invention further provides a screening method for identifying and/or obtaining a compound which is an activator or agonist of a polypeptide as listed in Tables 1, 3 to 6 whose expression is down-regulated in HCV-infected tissue comprising the steps of a) contacting said polypeptide with a compound or a plurality of compounds under conditions which allow interaction of said compound with said polypeptide; b) determining the activity of said polypeptide; c) comparing the activity of said polypeptide in the presence of the compound or the plurality of compounds to the activity determined in the absence of the compound or the plurality of compounds; and identifying and/or obtaining an activator or agonist, wherein an increased activity determined in (c) is indicative for an activator or agonist. The terms activator and agonist as used herein are used interchangeably. The screening method can be performed either as an in vitro assay, or as a host-based assay. The host to be employed in the screening methods of the present invention and comprising and/or expressing a polypeptide listed as in Tables 1, 3 to 6 may comprise prokaryotic as well as eukaryotic cells. Said cells may comprise bacterial cells, yeast cells, as well as cultured (tissue) cell lines, inter alia, derived from mammals. Furthermore animals may also be employed as hosts, for example non-human transgenic animals. Accordingly, said host (cell) may be transfected or transformed with the vector comprising a nucleic acid molecule encoding a polypeptide which is differentially expressed in HCV-infected tissue as disclosed herein. Said host cell or host may therefore be genetically modified with a nucleic acid molecule encoding such a polypeptide or with a vector comprising such a nucleic acid molecule.

[0021] The term “genetically modified” means that the host cell or host comprises in addition to its natural genome a nucleic acid molecule or vector coding for a polypeptide as listed in Tables 2 to 6 or at least a fragment thereof. Said additional genetic material may be introduced into the host (cell) or into one of its predecessors/parents. The nucleic acid molecule or vector may be present in the genetically modified host cell or host either as an independent molecule outside the genome, preferably as a molecule which is capable of replication, or it may be stably integrated into the genome of the host cell or host.

[0022] As mentioned herein above, the host cell of the present invention may be any prokaryotic or eukaryotic cell. Suitable prokaryotic cells are those generally used for cloning like E. coli or Bacillus subtilis. Yet, these prokaryotic host cells are also envisaged in the screening methods disclosed herein. Furthermore, eukaryotic cells comprise, for example, fungal or animal cells. Examples for suitable fungal cells are yeast cells, preferably those of the genus Saccharomyces and most preferably those of the species Saccharomyces cerevisiae. Suitable animal cells are, for instance, insect cells, vertebrate cells, preferably mammalian cells, such as e.g. CHO, HeLa, NIH3T3 or MOLT-4. Further suitable cell lines known in the art are obtainable from cell line depositories, like the American Type Culture Collection (ATCC).

[0023] The hosts may also be selected from non-human mammals, most preferably mice, rats, sheep, calves, dogs, monkeys or apes. As described herein above, said animals/mammals also comprise non-human transgenic animals, which preferably express at least one polypeptide differentially expressed in HCV-infected cells or tissue as disclosed herein. Preferably, said polypeptide is a polypeptide, which is up-regulated in tissue derived from HCV-infected subjects. Yet it is also envisaged that non-human transgenic animals be produced which do not express the polypeptides as disclosed herein or which only express limited amounts of said polypeptides. Said animals are preferably related to polypeptides, which are down-regulated in HCV-infected tissue. Transgenic non-human animals comprising and/or expressing the up-regulated polypeptides of the present invention or alternatively, which comprise silenced or less efficient versions of down-regulated polypeptides are useful models for studying the course and/or outcome of a HCV infection and provide for useful models for testing drugs and therapeutics for treatment of HCV infection.

[0024] A compound which inhibits or antagonizes or which activates or agonizes a polypeptide as listed in Tables 1 to 6 is identified by determining the activity of said polypeptide in the presence of said compound.

[0025] The term “activity” as used herein relates to the functional property or properties of a specific polypeptide. For the polypeptides as listed in Tables 1 to 6 know as enzymes, the term “activity” relates to the enzymatic activity of the specific polypeptide. Activity assays for the enzymes as listed in Tables 1 to 6 are well known in the art.

[0026] For the polypeptides as listed in Tables 1 to 6 know as adhesion molecules, the term “activity” relates to the adhesive properties of a polypeptide and may be determined using assays such as, but not limited to, adhesion assays, cell spreading assays, or in vitro interaction assays of the adhesion molecule with a known ligand. Such assays are well known in the art.

[0027] For the polypeptides as listed in Tables 1 to 6 known as cytoskeletal proteins, the term “activity” relates to the regulation of the cytoskeleton by such polypeptides, or to their incorporation into the cytoskeleton. As a non-limiting example, the ability of Gelsolin to regulate actin polymerization, or of Filamin A to promote orthogonal branching of actin filaments, may be determined using in vitro actin polymerization assays. Activity in relation to the regulation of cytoskeletal structures may further be determined by, as non-limiting examples, cell spreading assays, cell migration assays, cell proliferation assays or immunofluorecence assays, or by staining actin filaments with fluorescently labeled phalloidin. All of these assays are well known to the person skilled in the art.

[0028] For the polypeptides as listed in Tables 1 to 6 known as ion channels the term “activity” relates to ion flux across the membrane. Methods to determine ion flux across membranes are well known to the person skilled in the art.

[0029] For polypeptides as listed in Tables 1 to 6 known as transcription factors, the term “activity” relates to their ability to regulate gene transcription. The transcriptional activity of a polypeptide can be determined using assays know in the art, such as a reporter gene assay.

[0030] For polypeptides as listed in Tables 1 to 6 known as growth factors and hormones or their receptors, the term “activity” relates to their ability to bind to their receptors or ligands, respectively, and to induce receptor activation and subsequent signaling cascades, and/or it relates to the ability of the factor or receptor to mediate the cellular function or functions eventually caused by growth factor or hormone mediated receptor activation. Growth factor or hormone binding to receptors can be determined by commonly known ligand binding assays. Receptor activation can be determined by testing for receptor autophosphorylation, or by assaying for modification or recruitment of downstream signaling mediators to the receptors (by immunoprecipitation and Western Blotting of signaling complexes). Cellular functions regulated by growth factors or hormones and their receptors can be cell proliferation (e.g. determined by using thymidine incorporation or cell counts), cell migration assays (e.g. determined by using modified Boyden chambers), cell survival or apoptosis assays (e.g. determined by using DAPI staining), angiogenesis assays (e.g. in vitro assays to measure endothelial tube formation that are commercially available). In addition to these assays, other assays may be used as well to determine these and other cellular functions.

[0031] Inhibitors or antagonists of a polypeptide as listed in Tables 2 to 6 are identified by the screening method described above when there is a decreased activity determined in the presence of the compound in comparison to the activity in the absence of the compound in the screening method.

[0032] Activators or agonists of a polypeptides as listed in Tables 1, 3 to 6 are identified by the described screening method of the invention when there is an increased activity determined in the presence of the compound as compared to the activity in the absence of the compound in the screening method.

[0033] Further to the screening methods disclosed above, this invention provides a screening method for identifying and/or obtaining a compound which is an inhibitor of the expression of a polypeptide selected from the polypeptides as to listed in Tables 2 to 6 whose expression is up-regulated in HCV-infected tissue, comprising the steps of a) contacting a host which expresses said polypeptide with a compound or a plurality of compounds; b) determining the expression level of said polypeptide; c) comparing the expression level of said polypeptide in the presence of the compound or the plurality of compounds to the expression level of said polypeptide determined in the absence of the compound or plurality of compounds; and d), identifying and/or obtaining an inhibitor of the expression of a polypeptide, wherein a decreased expression level determined in (c) is indicative for an inhibitor of the expression of said polypeptide.

[0034] Further to the screening methods disclosed above, this invention provides a screening method for identifying and/or obtaining a compound which is an activator of the expression of a polypeptide selected from the polypeptides as to listed in Tables 1, 3 to 6 whose expression is down-regulated in HCV-infected tissue, comprising the steps of a) contacting a host which expresses said polypeptide with a compound or a plurality of compounds; b) determining the expression level of said polypeptide; c) comparing the expression level of said polypeptide in the presence of the compound or the plurality of compounds to the expression level of said polypeptide determined in the absence of the compound or plurality of compounds; and d), identifying and/or obtaining an activator of the expression of a polypeptide, wherein a increased expression level determined in (c) is indicative for an activator of the expression of said polypeptide.

[0035] An inhibitor of the expression of a polypeptide as listed in Tables 2 to 6 is identified by the screening method described hereinbefore, when a decreased expression of the protein is determined in the presence of the compound in comparison to the absence of the compound in the screening method, which is indicative for an inhibitor of the expression of a polypeptide.

[0036] The term “expression” as used herein relates to amount determined of a polypeptide as listed in Tables 2 to 6 which is up-regulated or down-regulated in HCV-infected tissue, in HCV-infected cells, which is elevated or reduced as compared to the amount of the same polypeptide in uninfected tissue or uninfected cells. Preferably, expression levels are at least 2 fold, more preferably at least 3 fold, even more preferably at least 4 fold, most preferably at least 5 fold higher or lower than in uninfected tissue or cells.

[0037] Furthermore, the present invention provides a compound identified and/or obtained by any of the screening methods hereinbefore described. The compounds identified and/or obtained by any of the screening methods of the present invention comprise small molecules, polypeptides, hormones, polynucleotides comprising antisense nucleotides and antibodies. A pharmaceutical composition comprising said compound and pharmaceutically acceptable carrier or diluent is further provided. A method for the preparation of said pharmaceutical composition comprising formulating said compound in a pharmaceutically acceptable carrier or diluent is also claimed. Any conventional carrier material can be utilized. The carrier material can be an organic or inorganic one suitable for eteral, percutaneous or parenteral administration. Suitable carriers include water, gelatin, gum arabic, lactose, starch, magnesium stearate, talc, vegetable oils, polyalkylene-glycols, petroleum jelly and the like. Furthermore, the pharmaceutical preparations may contain other pharmaceutically active agents. Additional additives such as flavoring agents, stabilizers, emulsifying agents, buffers and the like may be added in accordance with accepted practices of pharmaceutical compounding.

[0038] Said compound may be used for the preparation of a medicament for the treatment or prevention of HCV infection. Preferably, said compound is selected from the group comprising an antibody, an antibody-derivative, an antibody fragment, a peptide or an antisense construct.

[0039] Within the scope of the present invention, antibodies against the polypeptides as listed in Tables 1 to 6, or antigen-binding fragments thereof, for the use in an in vitro method for the prediction of the outcome of a HCV infection in a subject are provided.

[0040] In order to efficiently perform the prognostic method, the present invention provides a kit for the prediction of the outcome of a HCV infection in a subject comprising one or more of the antibodies, or antigen-binding fragments thereof as described above. Another kit provided by the invention is a kit for screening of compounds that activate or inhibit the activity, or activate or inhibit the expression, of any one of the polypeptides as listed in Tables 1 and 2.

[0041] Having now generally described this invention, the same will become better understood by reference to the specific examples, which are included herein for purpose of illustration only and are not intended to be limiting unless otherwise specified.

TABLE 1

| | |
|---|---|
| SEQ ID NO | Down-regulated polypeptides |

| | |
|---|---|
| 1 | HSUGP:006101-3-0 |
| 2 | HUMANGP:CHR11-Q9UMS4 |
| 3 | HUMANGP:CHR17-Q8TCD5 |
| 4 | HUMANGP:CHR19-Q9BVL0 |
| 5 | HUMANGP:CHR1-CAC22475 |
| 6 | HUMANGP:CHR1-Q9HB71 |
| 7 | HUMANGP:CHR4-Q96S43 |
| 8 | HUMANGP:CHR4-Q9Z130 |
| 9 | HUMANGP:CHR7-Q13122 |
| 10 | HUMANGP:CHR9-O60376 |
| 11 | HUMANGP:CHR9-Q9BS26 |
| 12 | SW_HUM:ACK1_HUMAN |
| 13 | SW_HUM:ACK2_HUMAN |
| 14 | SW_HUM:ALFC_HUMAN |
| 15 | SW_HUM:APT_HUMAN |
| 16 | SW_HUM:ARG1_HUMAN |
| 17 | SW_HUM:B53A_HUMAN |
| 18 | SW_HUM:CATB_HUMAN |
| 19 | SW_HUM:CN03_HUMAN |
| 20 | SW_HUM:COF1_HUMAN |
| 21 | SW_HUM:COPE_HUMAN |
| 22 | SW_HUM:DEST_HUMAN |
| 23 | SW_HUM:DHA5_HUMAN |
| 24 | SW_HUM:DHQU_HUMAN |
| 25 | SW_HUM:DPP3_HUMAN |
| 26 | SW_HUM:ECH1_HUMAN |
| 27 | SW_HUM:EF1D_HUMAN |
| 28 | SW_HUM:ENOL_HUMAN |
| 29 | SW_HUM:FIBG_HUMAN |
| 30 | SW_HUM:G3B2_HUMAN |
| 31 | SW_HUM:G3BP_HUMAN |
| 32 | SW_HUM:G6PD_HUMAN |
| 33 | SW_HUM:GAMT_HUMAN |
| 34 | SW_HUM:GRF1_HUMAN |
| 35 | SW_HUM:GTO1_HUMAN |
| 36 | SW_HUM:H105_HUMAN |
| 37 | SW_HUM:HDGF_HUMAN |
| 38 | SW_HUM:HMCS_HUMAN |
| 39 | SW_HUM:IF2A_HUMAN |
| 40 | SW_HUM:1F33_HUMAN |
| 41 | SW_HUM:1F41_HUMAN |
| 42 | SW_HUM:LAM1_HUMAN |
| 43 | SW_HUM:LAM2_HUMAN |
| 44 | SW_HUM:LAMA_HUMAN |
| 45 | SW_HUM:LDHA_HUMAN |
| 46 | SW_HUM:MAE1_HUMAN |
| 47 | SW_HUM:MAOX_HUMAN |
| 48 | SW_HUM:MDHC_HUMAN |
| 49 | SW_HUM:NDKA_HUMAN |
| 50 | SW_HUM:NDR1_HUMAN |
| 51 | SW_HUM:PCNA_HUMAN |
| 52 | SW_HUM:PGK1_HUMAN |
| 53 | SW_HUM:PRS6_HUMAN |
| 54 | SW_HUM:PSB7_HUMAN |
| 55 | SW_HUM:R23B_HUMAN |
| 56 | SW_HUM:ROC_HUMAN |
| 57 | SW_HUM:ROH2_HUMAN |
| 58 | SW_HUM:ROH3_HUMAN |
| 59 | SW_HUM:SC13_HUMAN |
| 60 | SW_HUM:SNAA_HUMAN |
| 61 | SW_HUM:SPEE_HUMAN |
| 62 | SW_HUM:TKT_HUMAN |
| 63 | SW_HUM:UBA1_HUMAN |
| 64 | SW_HUM:UBC1_HUMAN |
| 65 | SW_HUM:UBPE_HUMAN |
| 66 | SW_HUM:UNRI_HUMAN |
| 67 | SW_HUM:VAA1_HUMAN |
| 68 | SW_HUM:VIL1_HUMAN |
| 69 | TR_HUM:Q96HX0 |

[0042] TABLE 2

| | |
|---|---|
| SEQ ID NO | Up-regulated polypeptides |

| | |
|---|---|
| 70 | SW_HUM:PTB_HUMAN |
| 71 | SW_HUM:KPY2_HUMAN |
| 72 | SW_HUM:ACDB_HUMAN |
| 73 | SW_HUM:RS4_HUMAN |
| 74 | SW_HUM:CRKL_HUMAN |
| 75 | SW_HUM:DDX5_HUMAN |
| 76 | SW_HUM:LAS1_HUMAN |
| 77 | SW_HUM:SYY_HUMAN |
| 78 | SW_HUM:SEP7_HUMAN |
| 79 | SW_HUM:ATPO_HUMAN |
| 80 | SW_HUM:MCM3_HUMAN |
| 81 | SW_HUM:RL12_HUMAN |
| 82 | TR_HUM:Q9Y280 |
| 83 | SW_HUM:AMRP_HUMAN |
| 84 | SW_HUM:ARG2_HUMAN |
| 85 | SW_HUM:IF2B_HUMAN |
| 86 | SW_HUM:ROG_HUMAN |
| 87 | HUMANGP:CHR11-O75932 |
| 88 | SW_HUM:TCPD_HUMAN |
| 89 | HSUGP:075546-8-0 |
| 90 | HUMANGP:CHR3-O75191 |
| 91 | SW_HUM:DUS9_HUMAN |
| 92 | SW_HUM:GTM4_HUMAN |
| 93 | SW_HUM:RS8_HUMAN |
| 94 | SW_HUM:SM30_HUMAN |
| 95 | HSUGP:013561-2-0 |
| 96 | HUMANGP:CHR2-Q9UQE6 |
| 97 | HUMANGP:CHR7-Q9UNH0 |
| 98 | SW_HUM:PEBB_HUMAN |
| 99 | HSUGP:075309-23-0 |
| 100 | HSUGP:075309-24-0 |
| 101 | SW_HUM:NR54_HUMAN |
| 102 | SW_HUM:DDXY_HUMAN |
| 103 | HUMANGP:CHR8-O94905 |
| 104 | SW_HUM:COPD_HUMAN |
| 105 | SW_HUM:CAPB_HUMAN |
| 106 | SW_HUM:VATE_HUMAN |
| 107 | SW_HUM:ACLY_HUMAN |
| 108 | HSUGP:008768-9-0 |
| 109 | HSUGP:075546-6-0 |
| 110 | SW_HUM:DD17_HUMAN |
| 111 | SW_HUM:CAPG_HUMAN |
| 112 | SW_HUM:VAB1_HUMAN |
| 113 | SW_HUM:UBP5_HUMAN |
| 114 | TR_HUM:Q9BVH9 |
| 115 | SW_HUM:CGL1_HUMAN |
| 116 | SW_HUM:VIME_HUMAN |
| 117 | SW_HUM:PRO1_HUMAN |
| 118 | SW_HUM:RS2_HUMAN |
| 119 | SW_HUM:NADC_HUMAN |
| 120 | HUMANGP:CHR5-Q96NM0 |
| 121 | HUMANGP:CHR19-O95717 |
| 122 | SW_HUM:GNPI_HUMAN |
| 123 | SW_HUM:NAGK_HUMAN |
| 124 | SW_HUM:SODM_HUMAN |
| 125 | SW_HUM:ESTD_HUMAN |
| 126 | SW_HUM:GLYM_HUMAN |
| 127 | SW_HUM:IDHP_HUMAN |
| 128 | SW_HUM:PSA1_HUMAN |
| 129 | SW_HUM:K6A3_HUMAN |
| 130 | HUMANGP:CHR20-O14878 |
| 131 | SW_HUM:PAK2_HUMAN |
| 132 | SW_HUM:MEPD_HUMAN |
| 133 | SW_HUM:PSB5_HUMAN |
| 134 | SW_HUM:MK01_HUMAN |
| 135 | SW_HUM:MCCB_HUMAN |
| 136 | SW_HUM:RRB1_HUMAN |
| 137 | TR_HUM:Q96E67 |
| 138 | SW_HUM:HGD_HUMAN |
| 139 | SW_HUM:6PGD_HUMAN |
| 140 | SW_HUM:IF4N_HUMAN |
| 141 | SW_HUM:UCR2_HUMAN |
| 142 | SW_HUM:143Z_HUMAN |
| 143 | SW_HUM:TAL1_HUMAN |
| 144 | SW_HUM:NPS1_HUMAN |
| 145 | SW_HUM:DCUP_HUMAN |
| 146 | SW_HUM:AATM_HUMAN |
| 147 | SW_HUM:PSA2_HUMAN |
| 148 | SW_HUM:KPY1_HUMAN |
| 149 | SW_HUM:AATC_HUMAN |
| 150 | SW_HUM:ATPA_HUMAN |
| 151 | SW_HUM:E2BG_HUMAN |
| 152 | SW_HUM:GLPK_HUMAN |
| 153 | SW_HUM:RS2_HUMAN |
| 154 | SW_HUM:SYFA_HUMAN |
| 155 | SW_HUM:DJA1_HUMAN |
| 156 | SW_HUM:SYSM_HUMAN |
| 157 | SW_HUM:HAXI_HUMAN |
| 158 | HUMANGP:CHR19-Q96G16 |
| 159 | HUMANGP:CHR10-Q9HBK9 |
| 160 | SW_HUM:SPS1_HUMAN |
| 161 | SW_HUM:IF39_HUMAN |
| 162 | SW_HUM:NCB1_HUMAN |
| 163 | SW_HUM:Y33K_HUMAN |
| 164 | SW_HUM:HEM6_HUMAN |
| 165 | SW_HUM:THIM_HUMAN |
| 166 | SW_HUM:SRC8_HUMAN |
| 167 | SW_HUM:KAD4_HUMAN |
| 168 | HUMANGP:CHR12-Q9NRV9 |
| 169 | HUMANGP:CHR12-Q14221 |
| 170 | SW_HUM:MYG1_HUMAN |
| 171 | SW_HUM:MPPA_HUMAN |
| 172 | SW_HUM:PSDB_HUMAN |
| 173 | SW_HUM:ACDM_HUMAN |
| 174 | SW_HUM:GIPC_HUMAN |
| 175 | HUMANGP:CHR1-AAH15403 |
| 176 | SW_HUM:GATM_HUMAN |
| 177 | SW_HUM:PSE3_HUMAN |
| 178 | SW_HUM:CALU_HUMAN |
| 179 | SW_HUM:DCT2_HUMAN |
| 180 | SW_HUM:HCD2_HUMAN |
| 181 | SW_HUM:PDXK_HUMAN |
| 182 | SW_HUM:IF6_HUMAN |
| 183 | SW_HUM:PDX5_HUMAN |
| 184 | SW_HUM:PP1G_HUMAN |
| 185 | SW_HUM:PIMT_HUMAN |
| 186 | SW_HUM:TCPQ_HUMAN |
| 187 | HSUGP:333417-11-0 |
| 188 | SW_HUM:PSB3_HUMAN |
| 189 | HUMANGP:CHR6-Q8TDM4 |
| 190 | SW_HUM:BIEA_HUMAN |
| 191 | SW_HUM:RAN_HUMAN |
| 192 | SW_HUM:PRS8_HUMAN |
| 193 | HUMANGP:CHR1-O14805 |
| 194 | SW_HUM:PSA6_HUMAN |
| 195 | SW_HUM:6PGL_HUMAN |
| 196 | HUMANGP:CHR19-Q8WVX0 |
| 197 | SW_HUM:ACON_HUMAN |
| 198 | SW_HUM:UCR1_HUMAN |
| 199 | SW_HUM:HS27_HUMAN |

[0043] TABLE 3

| | Up- or downregulated m_RNA |
|---|---|
| | binding poteins and mRNA |
| SEQ ID NO | chaperones (selected from Tables 1 and 2) |
| 70 | PTB_HUMAN |
| 101 | NR54_HUMAN |
| 75 | DDX5_HUMAN |
| 110 | DD17_HUMAN |
| 102 | DDXY_HUMAN |
| 86 | ROG_HUMAN |
| 82 | Q9Y280 |

[0044] TABLE 4

| | Up- or downregulated proteins |
|---|---|
| | involved in the regulation of protein |
| SEQ ID NO | synthesis (selected from Tables 1 and 2) |
| 85 | IF2B_HUMAN |
| 151 | E2BG_HUMAN |
| 161 | IF39_HUMAN |
| 140 | IF4N_HUMAN |
| 182 | IF6_HUMAN |
| 136 | RRB1_HUMAN |
| 129 | K6A3_HUMAN |

[0045] TABLE 5

| | Up- or downregulated proteins |
|---|---|
| | involved in lipid metabolism |
| SEQ ID NO | (selected from Tables 1 and 2) |
| 180 | HDC2_HUMAN |
| 173 | ACDM_HUMAN |
| 72 | ACDB_HUMAN |
| 135 | MCCB_HUMAN |
| 165 | THIM_HUMAN |

[0046] TABLE 6

| | Up- or downregulated proteins |
|---|---|
| | involved in signal transduction |
| SEQ ID NO | pathways (selected from Tables 1 and 2) |
| 91 | DUS9_HUMAN |
| 98 | PEBB_HUMAN |
| 166 | SCR8_HUMAN |
| 157 | HAX1_HUMAN |
| 131 | PAK2_HUMAN |
| 193 | O14805 |

### EXAMPLES

[0047] Commercially available reagents referred to in the examples were used according to manufacturer's instructions unless otherwise indicated.

### Example 1

[0048] Huh 8.1 cell line was grown under standard conditions (control) and compared to Huh 9.13 (replicon). The Huh 9.13 cell line was prepared according to Lohmann, V. et al., Science 1999, 285, 110-113. The growth experiment was repeated 3 times, different cell lysis conditions were employed each time (Lohmann, V, et al., (1999), Science 285, 110-113; Bartenschläger, R. (2002), Nature Reviews, Hepatitis C virus replicons: potential role for drug development, Vol. 1, 911-916).

[0049] Several standard cell fractions using differential centrifugation (800 g, 12000 g, 60000 g) were generated. In addition, a particle fraction enriched in replicon protein (replicon particle) was isolated by differential centrifugation/density gradient centrifugation. For all fractions, sample/control pairs of 2D PAGE were run under identical conditions using IPG ranges from 3-10 and 4-7/6-10, and all accessible protein spots were identified using MALDI MS peptide fingerprinting.

[image]

[0050] For comparison, the results of all experiments were combined and counts of protein identifications were generated. A protein was assigned as “up-regulated” (“down-regulated”) if it was found in at least two samples and if it was either totally absent in the control (respective replicon sample) or the quotient between the count of mass spectra identified as the protein in the sample and control was larger than 2 (smaller than 0.5).

[0051] Polypeptides down-regulated by the presence of HCV replicon-derived RNA are depicted in Table 1, and polypeptides up-regulated by the presence of HCV replicon derived RNA are depicted in Table 2, comprising a number of interesting mRNA binding proteins and dysregulated components of the protein synthesis machinery.

1. An in vitro method for the prediction of the outcome of a HCV infection in a subject comprising obtaining a biological sample from a HCV-infected subject and determining the expression level of at least one polypeptide selected from SEQUENCE ID NOS. 1-199.

2. The method of claim 1, further comprising comparing the expression level of the at least one polypeptide to its expression level determined at another time point in the course of a HCV infection or to its expression level in a biological sample from a subject uninfected with HCV.

3. The method of claim 1 wherein the polypeptide is selected from the group consisting of SEQUENCE ID NOS. 70, 75, 82, 86, 101, 102 and 110.

4. The method of claim 1 wherein the polypeptide is selected from the group consisting of SEQUENCE ID NOS. 85, 129, 136, 140, 151, 161, and 182.

5. The method of claim 1 wherein the polypeptide is selected from the group consisting of SEQUENCE ID NOS. 72, 135, 165, 173, and 180.

6. The method of claim 1 wherein the polypeptide is selected from the group consisting of SEQUENCE ID NOS. 91, 98, 131, 157, 166 and 193.

7. A screening method for identifying a compound which interacts with at least one polypeptide selected from the polypeptides of SEQUENCE ID NOS. 1-199 whose expression is up-regulated or down-regulated in HCV-infected tissue comprising the steps of
a) contacting said polypeptide with a compound or a plurality of compounds under conditions which allow interaction of said compound with said polypeptide; and
b) determining whether the activity of said polypeptide is modified.

8. A screening method for identifying a compound which is an inhibitor or an antagonist of a polypeptide of SEQUENCE ID NOS. 70-199 whose expression is up-regulated in HCV-infected tissue, comprising the steps of
a) contacting said polypeptide with a compound or a plurality of compounds under conditions which allow interaction of said compound(s) with said polypeptide;
b) determining the activity of said polypeptide;
c) comparing the activity of said polypeptide in the presence of the compound(s) to the activity determined in the absence of the compound(s);
wherein a decreased activity determined in (c) is indicative of inhibitor or antagonist activity of such compound(s).

9. A screening method for identifying a compound which is an activator or an agonist of a polypeptide of SEQUENCE ID NOS. 1-69 whose expression is down-regulated in HCV-infected tissue, comprising the steps of
a) contacting said polypeptide with a compound or a plurality of compounds under conditions which allow interaction of said compound(s) with said polypeptide;
b) determining the activity of said polypeptide;
c) comparing the activity of said polypeptide in the presence of the compound(s) to the activity determined in the absence of the compound(s);
wherein an increased activity determined in (c) is indicative of activator or agonist activity of such compound(s).

10. The method of claim 8 wherein the polypeptide is selected from the group consisting of SEQUENCE ID NOS. 70, 75, 82, 86, 101, 102 and 110.

11. The method of claim 8 wherein the polypeptide is selected from the group consisting of SEQUENCE ID NOS. 85, 129, 136, 140, 151, 161, and 182.

12. The method of claim 8 wherein the polypeptide is selected from the group consisting of SEQUENCE ID NOS. 72, 135, 165, 173, and 180.

13. The method of claim 8 wherein the polypeptide is selected from the group consisting of SEQUENCE ID NOS. 91, 98, 131, 157, 166 and 193.

14. A screening method for identifying a compound which is an inhibitor of the expression of a polypeptide selected from the polypeptides of SEQUENCE ID NOS. 70-199 whose expression is up-regulated in HCV-infected tissue, comprising the steps of
a) contacting a host cell which expresses said polypeptide with a compound or a plurality of compounds;
b) determining the expression level of said polypeptide;
c) comparing the expression level determined in the presence of the compound(s) to the expression level determined in the absence of the compound(s);
wherein a decreased expression level determined in (c) is indicative of an inhibitor of the expression of said polypeptide.

15. The method of claim 14 wherein the polypeptide is selected from the group consisting of SEQUENCE ID NOS. 70, 75, 82, 86, 101, 102 and 110.

16. The method of claim 14 wherein the polypeptide is selected from the group consisting of SEQUENCE ID NOS. 85, 129, 136, 140, 151, 161, and 182.

17. The method of claim 14 wherein the polypeptide is selected from the group consisting of SEQUENCE ID NOS. 72, 135, 165, 173, and 180.

18. The method of claim 14 wherein the polypeptide is selected from the group consisting of SEQUENCE ID NOS. 91, 98, 131, 157, 166 and 193.

19. A screening method for identifying a compound which is an activator of the expression of a polypeptide selected from the polypeptides of SEQUENCE ID NOS. 1-69 whose expression is down-regulated in HCV-infected tissue, comprising the steps of
a) contacting a host cellwhich expresses said polypeptide with a compound or a plurality of compounds;
b) determining the expression level of said polypeptide;
c) comparing the expression level determined in the presence of the compound(s) to the expression level determined in the absence of the compound(s);
wherein an increased expression level determined in (c) is indicative of an activator of the expression of said polypeptide.

20. A compound identified by the screening method of claim 14.

21. A compound identified by the screening method of claim 19.

22. A pharmaceutical composition comprising the compound of claim 20 and a pharmaceutically acceptable carrier or diluent.

23. A pharmaceutical composition comprising the compound of claim 21 and a pharmaceutically acceptable carrier or diluent.

24. A method for treating HCV infection comprising administering a pharmaceutically effective amount of the composition of claim 17 to a patient infected with HCV.

25. A method for treating HCV infection comprising administering a pharmaceutically effective amount of the composition of claim 18 to a patient infected with HCV.

26. An antibody composition comprising an antibody or the antigen-binding fragment of an antibody that selectively binds to a polypeptide selected from the group consisting of SEQUENCE ID NOS. 1-199

27. A kit for the prediction of the outcome of a HCV infection in a subject comprising one or more of the antibody compositions, of claim 26.

28. A target host cell for testing an antiviral compound comprising a cell which is genetically modified so as to express at least one polypeptide selected from SEQUENCE ID NOS. 1-199.

The application's sequence listing, which the Patent Office published only in electronic form, follows.

SEQUENCE LISTING (199 sequences)

SEQ ID NO: 1 - protein, 414 aa, Homo sapiens
  MISC_FEATURE (307)..(307): Xaa is an undetermined amino acid residue
  ref <308>: DATABASE ACCESSION NUMBER: hsugp:006101-3-0
  ref <309>: DATABASE ENTRY DATE: 2003-02-16
LPLLARPAALTALLLLLLAMAAADGPPAADGEDGQDPHSKHLYTADMFTHGIQSAAHFVMFFAPEMGSCSVTQPETSGTQPQLTVASNSWAQVILLPQPLKYCDYRRRCGHCQRLQPTWNDLGDKYNSMEDAKVYVAKVDCTAHSDVCSAQGVRGYPTLKLFKPGQEAVKYQGPRDFQTLENWMLQTLNEEPVTPEPEVEPPSAPELKQGLYELSASNFELHVAQGDHFIKFFAPWCGHCKALAPTWEQLALGLEHSETVKIGKVDCTQHYELCSGNQVRGYPTLLWFRDGKKVDQYKGKRDLESQXEPEADKGTVLALTENNFDDTIAEGITFIKFYAPWCGHCKTLAPTWEELSKKEFPGLAGVKIAEVDCTLNGISAASIRYEATPRYCFSEEGRKSVSTVEAETLTRYTA

SEQ ID NO: 2 - protein, 503 aa, Homo sapiens
  ref <308>: DATABASE ACCESSION NUMBER: humangp:chr11-q9ums4
  ref <309>: DATABASE ENTRY DATE: 2003-04-22
SLFSTVSNEVPEHPCVSPVSNHVYERRLIEKYIAENGTDPINNQPLSEEQLIDIKVAHPIRPKPPSATSIPAILKALQDEWDAVMLHSFTLRQQLQTTRQELSHALYQHDAACRVIARLTKEVTAAREALATLKPQAGLIVPQAVPSSQPSVVGAGEPMDLGELVGMTPEIIQKLQDKATVLTTERKKRGKTVPEELVKPEELSKYRQVASHVGLHSASIPGILALDLCPSDTNKILTGGADKNVVVFDKSSEQILATLKGHTKKVTSVVFHPSQDLVFSASPDATIRIWSVPNASCVQVVRAHESAVTGLSLHATGDYLLSSSDDQYWAFSDIQTGRVLTKVTDETSGCSLTCAQFHPDGLIFGTGTMDSQIKIWDLKERTNVANFPGHSGPITSIAFSENGYYLATAADDSSVKLWDLRKLKNFKTLQLDNNFEVKSLIFDQSGTYLALGGTDVQIYICKQWTEILHFTEHSGLTTGVAFGHHAKFIASTGMDRSLKFYSL

SEQ ID NO: 3 - protein, 201 aa, Homo sapiens
  ref <308>: DATABASE ACCESSION NUMBER: humangp/chr17-q8tcd5
  ref <309>: DATABASE ENTRY DATE: 2003-04-22
MARSVRVLVDMDGVLADFEAGLLRGFRRRFPEEPHVPLEQRRGFLAREQYRALRPDLADKVASVYEAPGFFLDLEPIPGALDAVREMNDLPDTQVFICTSPLLKYHHCVGEKYRWVEQHLGPQFVERIILTRDKTVVLGDLLIDDKDTVRGQEETPSWEHILFTCCHNRHLVLPPTRRRLLSWSDNWREILDSKRGAAQRE

SEQ ID NO: 4 - protein, 277 aa, Homo sapiens
  ref <308>: DATABASE ACCESSION NUMBER: humangp/chr19-q9bvl0
  ref <309>: DATABASE ENTRY DATE: 2003-04-22
MANPKLLGMGLSEAEAIGADSARFEELLLQASKELQQAQTTRPESTQIQPQPGFCIKTNSSEGKVFINICHSPSIPPPADVTEEELLQMLEEDQAGFRIPMSLGEPHAELDAKGQGCTAYDVAVNSDFYRRMQNSDFLRELVITIAREGLEDKYNLQLNPEWRMMKNRPFMGSISQQNIRSEQRPRIQELGDLYTPAPGRAESGPEKPHLNLWLEAPDLLLAEVDLPKLDGALGLSLEIGENRLVMGGPQQLYHLDAYIPLQINSHESKAAFHRKRK

SEQ ID NO: 5 - protein, 224 aa, Homo sapiens
  ref <308>: DATABASE ACCESSION NUMBER: humangp/chr1cac22475
  ref <309>: DATABASE ENTRY DATE: 2003-04-22
QLQKDLEEVKVLLEKATRKRVRDALTAEKSKIETEIKNKMQQKSQKKAELLDNEKPAAVVAPITTGYTVKISNYGWDQSDKFVKIYITLTGVHQVPTENVQVHFTERSFDLLVKNLNGKSYSMIVNNLLKPISVEGSSKKVKTDTVLILCRKKVENTRWDYLTQVEKECKEKEKPSYDTETDPSEGLMNVLKKIYEDGDDDMKRTINKAWVESREKQAKGDTEF

SEQ ID NO: 6 - protein, 198 aa, Homo sapiens
  ref <308>: DATABASE ACCESSION NUMBER: humangp/chr1q9hb71
  ref <309>: DATABASE ENTRY DATE: 2003-04-22
QLQKDLEEVKVLLEKATRKRVRDALTAEKSKIETEIKNKMQQKSQKKAELLDNEKPAAVVAPITTGYTVKISNYGWDQSDKFVKIYITLTGVHQVPTENVQVHFTERSFDLLVKNLNGKSYSMIVNNLLKPISVEGSSKKVKTDTVLILCRKKVENTRWDYLTQVEKECKEKEKPSYDTETDPSEGLMNVLKKIYEDG

SEQ ID NO: 7 - protein, 244 aa, Homo sapiens
  ref <308>: DATABASE ACCESSION NUMBER: humangp/chr4-q96s43
  ref <309>: DATABASE ENTRY DATE: 2003-04-22
MEDMNEYSNIEEFAEGSKINASKNQQDDGKMFIGGLSWDTSKKDLTEYLSRFGEVVDCTIKTDPVTGRSRGFGFVLFKDAASVDKVLELKEHKLDGKLIDPKRAKALKGKEPPKKVFVGGLSPDTSEEQIKEYFGAFGEIENIELPMDTKTNERRGFCFITYTDEEPVKKLLESRYHQIGSGKCEIKVAQPKEVYRQQQQQQKGGRGAAAGGRGGTRGRGRGQQSTYGKASRGGGNHQNNYQPY

SEQ ID NO: 8 - protein, 301 aa, Homo sapiens
  ref <308>: DATABASE ACCESSION NUMBER: humangp/chr4-q9z130
  ref <309>: DATABASE ENTRY DATE: 2003-04-22
MEDMNEYSNIEEFAEGSKINASKNQQDDGKMFIGGLSWDTSKKDLTEYLSRFGEVVDCTIKTDPVTGRSRGFGFVLFKDAASVDKVLELKEHKLDGKLIDPKRAKALKGKEPPKKVFVGGLSPDTSEEQIKEYFGAFGEIENIELPMDTKTNERRGFCFITYTDEEPVKKLLESRYHQIGSGKCEIKVAQPKEVYRQQQQQQKGGRGAAAGGRGGTRGRGRGQGQNWNQGFNNYYDQGYGNYNSAYGGDQNYSGYGGYDYTGYNYGNYGYGQGYADYSGQQSTYGKASRGGGNHQNNYQPY

SEQ ID NO: 9 - protein, 884 aa, Homo sapiens
  ref <308>: DATABASE ACCESSION NUMBER: chr7-q13122
  ref <309>: DATABASE ENTRY DATE: 2003-04-22
VLSGCAIIVRGQPRGGPPPERQINLSNIRAGNLARRAAATQPDAKDTPDEPWAFPAREFLRKKLIGKEVCFTIENKTPQGREYGMIYLGKDTNGENIAESLVAEGLATRREGMRANNPEQNRLSECEEQAKAAKKGMWSEGNGSHTIRDLKYTIENPRHFVDSHHQKPVNAIIEHVRDGSVVRALLLPDYYLVTVMLSGIKCPTFRREADGSETPEPFAAEAKFFTESRLLQRDVQIILESCHNQNILGTILHPNGNITELLLKEGFARCVDWSIAVYTRGAEKLRAAERFAKERRLRIWRDYVAPTANLDQKDKQFVAKVMQVLNADAIVVKLNSGDYKTIHLSSIRPPRLEGENTQDKNKKLRPLYDIPYMFEAREFLRKKLIGKKVNVTVDYIRPASPATETVPAFSERTCATVTIGGINIAEALVSKGLATVIRYRQDDDQRSSHYDELLAAEARAIKNGKGLHSKKEVPIHRVADISGDTQKAKQFLPFLQRAGRSEAVVEYVFSGSRLKLYLPKETCLITFLLAGIECPRGARNLPGLVQEGEPFSEEATLFTKELVLQREVEVEVESMDKAGNFIGWLHIDGANLSVLLVEHALSKVHFTAERSSYYKSLLSAEEAAKQKKEKVWAHYEEQPVEEVMPVLEEKERSASYKPVFVTEITDDLHFYVQDVETGTQLEKLMENMRNDIASHPPVEGSYAPRRGEFCIAKFVDGEWYRARVEKVESPAKIHVFYIDYGNREVLPSTRLGTLSPAFSTRVLPAQATEYAFAFIQVPQDDDARTDAVDSVVRDIQNTQCLLNVEHLSAGCPHVTLQFADSKGDVGLGLVKEGLVMVEVRKEKQFQKVITEYLNAQESAKSARLNLWRYGDFRADDADEFGYSR

SEQ ID NO: 10 - protein, 355 aa, Homo sapiens
  ref <308>: DATABASE ACCESSION NUMBER: humangp/chr9-060376
  ref <309>: DATABASE ENTRY DATE: 2003-04-22
LQGSLLASGRAPRRASSGLPRNTVVLFVPQQEAWVVERMGRFHRILEPGLNILIPVLDRIRYVQSLKEIVINVPEQSAVTLDNVTLQIDGVLYLRIMDPYKASYGVEDPEYAVTQLAQTTMRSELGKLSLDKVFRERESLNASIVDAINQAADCWGIRCLRYEIKDIHVPPRVKESMQMQVGAKEGWEKGLRVEAERRKRATVLESEGTRESAINVAEGKKQAQILASEAEKAEQINQAAGEASAVLAKAKAKAEAIRILAAALTQHNGDAAASLTVAEQYVSAFSKLAKDSNTILLPSNPGDVTSMVAQAMGVYGALTKAPVPGTPDSLSSGSSRDVQGTDASLDEELDRVKMS

SEQ ID NO: 11 - protein, 406 aa, Homo sapiens
  ref <308>: DATABASE ACCESSION NUMBER: humangp/chr9-q9bs26
  ref <309>: DATABASE ENTRY DATE: 2003-04-22
MHPAVFLSLPDLRCSLLLLVTWVFTPVTTEITSLDTENIDEILNNADVALVNFYADWCRFSQMLHPIFEEASDVIKEEFPNENQVVFARVDCDQHSDIAQRYRISKYPTLKLFRNGMMMKREYRGQRSVKALADYIRQQKSDPIQEIRDLAEITTLDRSKRNIIGYFEQKDSDNYRVFERVANILHDDCAFLSAFGDVSKPERYSGDNIIYKPPGHSAPDMVYLGAMTNFDVTYNWIQDKCVPLVREITFENGEELTEEGLPFLILFHMKEDTESLEIFQNEVARQLISEKGTINFLHADCDKFRHPLLHIQKTPADCPVIAIDSFRHMYVFGDFKDVLIPGKLKQFVFDLHSGKLHREFHHGPDPTDTAPGEQAQDVASSPPESSFQKLAPSEYRYTLLRDRDEL

SEQ ID NO: 12 - protein, 323 aa, Homo sapiens
  ref <308>: DATABASE ACCESSION NUMBER: sw_hum/akc1_human
  ref <309>: DATABASE ENTRY DATE: 1993-10-01
MDSKYQCVKLNDGHFMPVLGFGTYAPAEVPKSKALEATKLAIEAGFRHIDSAHLYNNEEQVGLAIRSKIADGSVKREDIFYTSKLWCNSHRPELVRPALERSLKNLQLDYVDLYLIHFPVSVKPGEEVIPKDENGKILFDTVDLCATWEAVEKCKDAGLAKSIGVSNFNRRQLEMILNKPGLKYKPVCNQVECHPYFNQRKLLDFCKSKDIVLVAYSALGSHREEPWVDPNSPVLLEDPVLCALAKKHKRTPALIALRYQLQRGVVVLAKSYNEQRIRQNVQVFEFQLTSEEMKAIDGLNRNVRYLTLDIFAGPPNYPFSDEY

SEQ ID NO: 13 - protein, 323 aa, Homo sapiens
  ref <308>: DATABASE ACCESSION NUMBER: sw_hum/ack2_human
  ref <309>: DATABASE ENTRY DATE: 1996-10-01
MDSKYQCVKLNDGHFMPVLGFGTYAPAEVPKSKALEAVKLAIEAGFHHIDSAHVYNNEEQVGLAIRSKIADGSVKREDIFYTSKLWSNSHRPELVRPALERSLKNLQLDYVDLYLIHFPVSVKPGEEVIPKDENGKILFDTVDLCATWEAMEKCKDAGLAKSIGVSNFNHRLLEMILNKPGLKYKPVCNQVECHPYFNQRKLLDFCKSKDIVLVAYSALGSHREEPWVDPNSPVLLEDPVLCALAKKHKRTPALIALRYQLQRGVVVLAKSYNEQRIRQNVQVFEFQLTSEEMKAIDGLNRNVRYLTLDIFAGPPNYPFSDEY

SEQ ID NO: 14 - protein, 363 aa, Homo sapiens
  ref <308>: DATABASE ACCESSION NUMBER: sw_hum/alfc_human
  ref <309>: DATABASE ENTRY DATE: 1989-03-01
PHSYPALSAEQKKELSDIALRIVAPGKGILAADESVGSMAKRLSQIGVENTEENRRLYRQVLFSADDRVKKCIGGVIFFHETLYQKDDNGVPFVRTIQDKGIVVGIKVDKGVVPLAGTDGETTTQGLDGLSERCAQYKKDGADFAKWRCVLKISERTPSALAILENANVLARYASICQQNGIVPIVEPEILPDGDHDLKRCQYVTEKVLAAVYKALSDHHVYLEGTLLKPNMVTPGHACPIKYTPEEIAMATVTALRRTVPPAVPGVTFLSGGQSEEEASFNLNAINRCPLPRPWALTFSYGRALQASALNAWRGQRDNAGAATEEFIKRAEVNGLAAQGKYEGSGEDGGAAAQSLYIANHAY

SEQ ID NO: 15 - protein, 179 aa, Homo sapiens
  ref <308>: DATABASE ACCESSION NUMBER: sw_hum/apt_human
  ref <309>: DATABASE ENTRY DATE: 1988-08-01
ADSELQLVEQRIRSFPDFPTPGVVFRDISPVLKDPASFRAAIGLLARHLKATHGGRIDYIAGLDSRGFLFGPSLAQELGLGCVLIRKRGKLPGPTLWASYSLEYGKAELEIQKDALEPGQRVVVVDDLLATGGTMNAACELLGRLQAEVLECVSLVELTSLKGREKLAPVPFFSLLQYE

SEQ ID NO: 16 - protein, 322 aa, Homo sapiens
  ref <308>: DATABASE ACCESSION NUMBER: sw_hum/argi_human
  ref <309>: DATABASE ENTRY DATE: 1987-08-13
MSAKSRTIGIIGAPFSKGQPRGGVEEGPTVLRKAGLLEKLKEQECDVKDYGDLPFADIPNDSPFQIVKNPRSVGKASEQLAGKVAEVKKNGRISLVLGGDHSLAIGSISGHARVHPDLGVIWVDAHTDINTPLTTTSGNLHGQPVSFLLKELKGKIPDVPGFSWVTPCISAKDIVYIGLRDVDPGEHYILKTLGIKYFSMTEVDRLGIGKVMEETLSYLLGRKKRPIHLSFDVDGLDPSFTPATGTPVVGGLTYREGLYITEEIYKTGLLSGLDIMEVNPSLGKTPEEVTRTVNTAVAITLACFGLAREGNHKPIDYLNPPK

SEQ ID NO: 17 - protein, 429 aa, Homo sapiens
  ref <308>: DATABASE ACCESSION NUMBER: sw_hum/b53a_human
  ref <309>: DATABASE ENTRY DATE: 2003-02-28
MSGGVYGGDEVGALVFDIGSYTVRAGYAGEDCPKVDFPTAIGMVVERDDGSTLMEIDGDKGKQGGPTYYIDTNALRVPRENMEAISPLKNGMVEDWDSFQAILDHTYKMHVKSEASLHPVLMSEAPWNTRAKREKLTELMFEHYNIPAFFLCKTAVLTAFANGRSTGLILDSGATHTTAIPVHDGYVLQQGIVKSPLAGDFITMQCRELFQEMNIELVPPYMIASKEAVREGSPANWKRKEKLPQVTRSWHNYMCNCVIQDFQASVLQVSDSTYDEQVAAQMPTVHYEFPNGYNCDFGAERLKIPEGLFDPSNVKGLSGNTMLGVSHVVTTSVGMCDIDIRPGLYGSVIVAGGNTLIQSFTDRLNRELSQKTPPSMRLKLIANNTTVERRFSSWIGGSILASLGTFQQMWISKQEYEEGGKQCVERKCP

SEQ ID NO: 18 - protein, 339 aa, Homo sapiens [sequence omitted]

SEQ ID NO: 19 - protein, 338 aa, Homo sapiens
  ref <308>: DATABASE ACCESSION NUMBER: sw_hum/cn03_human
  ref <309>: DATABASE ENTRY DATE: 2001-10-16
MAKWGEGDPRWIVEERADATNVNNWHWTERDASNWSTDKLKTLFLAVQVQNEEGKCEVTEVSKLDGEASINNRKGKLIFFYEWSVKLNWTGTSKSGVQYKGHVEIPNLSDENSVDEVEISVSLAKDEPDTNLVALMKEEGVKLLREAMGIYISTLKTEFTQGMILPTMNGESVDPVGQPALKTEERKAKPAPSKTQARPVGVKIPTCKITLKETFLTSPEELYRVFTTQELVQAFTHAPATLEADRGGKFHMVDGNVSGEFTDLVPEKHIVMKWRFKSWPEGHFATITLTFIDKNGETELCMEGRGIPAPEEERTRQGWQRYYFEGIKQTFGYGARLF

SEQ ID NO: 20 - protein, 166 aa, Homo sapiens
  ref <308>: DATABASE ACCESSION NUMBER: sw_hum/cof1_human
  ref <309>: DATABASE ENTRY DATE: 1991-11-01
MASGVAVSDGVIKVFNDMKVRKSSTPEEVKKRKKAVLFCLSEDKKNIILEEGKEILVGDVGQTVDDPYATFVKMLPDKDCRYALYDATYETKESKKEDLVFIFWAPESAPLKSKMIYASSKDAIKKKLTGIKHELQANCYEEVKDRCTLAEKLGGSAVISLEGKPL

SEQ ID NO: 21 - protein, 307 aa, Homo sapiens
  ref <308>: DATABASE ACCESSION NUMBER: sw_hum/cope_human
  ref <309>: DATABASE ENTRY DATE: 2000-05-30
APPAPGPASGGSGEVDELFDVKNAFYIGSYQQCINEAQRVKLSSPERDVERDVFLYRAYLAQRKFGVVLDEIKPSSAPELQAVRMFADYLAHESRRDSIVAELDREMSRSVDVTNTTFLLMAASIYLHDQNPDAALRALHQGDSLECTAMTVQILLKLDRLDLARKELKRMQDLDEDATLTQLATAWVSLATGGEKLQDAYYIFQEMADKCSPTLLLLNGQAACHMAQGRWEAAEGLLQEALDKDSGYPETLVNLIVLSQHLGKPPEVTNRYLSQLKDAHRSHPFIKEYQAKENDFDRLVLQYAPSA

SEQ ID NO: 22 - protein, 165 aa, Homo sapiens
  ref <308>: DATABASE ACCESSION NUMBER: sw_hum/dest_human
  ref <309>: DATABASE ENTRY DATE: 1990-11-01
MASGVQVADEVCRIFYDMKVRKCSTPEEIKKRKKAVIFCLSADKKCIIVEEGKEILVGDVGVTITDPFKHFVGMLPEKDCRYALYDASFETKESRKEELMFFLWAPELAPLKSKMIYASSKDAIKKKFQGIKHECQANGPEDLNRACIAEKLGGSLIVAFEGCPV

SEQ ID NO: 23 - protein, 517 aa, Homo sapiens
  ref <308>: DATABASE ACCESSION NUMBER: sw_hum/dha5_human
  ref <309>: DATABASE ENTRY DATE: 1993-07-01
MLRFLAPRLLSLQGRTALYSSAAALPSPILNPDIPYNQLFINNEWQDAVSKKTFPTVNPTTGEVIGHVAEGDRADVDRAVKAAREAFRLGSPWRRMDASERGRLLNLLADLVERDRVYLASLETLDNGKPFQESYALDLDEVIKVYRYFAGWADKWHGKTIPMHGQHFCFTRHEPVGVCGQIIPWNFPLVMQGWKLAPALATGNTVVMKVAEQTPLSALYLASLIKEAGFPPGVVNIITGYGPTAGAAIAQHMDVDKVAFTGSTEVGHLIQKAAGDSNLKRVTLELGGKSPSIVLADADMEHAVEQCHEALFFNMGQCCCAGSRTFVEESIYNEFLERTVEKAKQRKVGNPFELDTQQGPQVDKEQFERVLGYIQLGQKEGAKLLCGGERFGERGFFIKPTVFGGVQDDMRIAKEEIFGPVQPLFKFKKIEEVVERANNTRYGLAAAVFTRDLDKAMYFTQALQAGTVWVNTYNIVTCHTPFGGFKESGNGRELGEDGLKAYTEVKTVTIKVPQKNS

SEQ ID NO: 24 - protein, 274 aa, Homo sapiens
  ref <308>: DATABASE ACCESSION NUMBER: sw_hum/dhqu_human
  ref <309>: DATABASE ENTRY DATE: 1990-04-01
MVGRRALIVLAHSERTSFNYAMKEAAAAALKKKGWEVVESDLYAMNFNPIISRKDITGKLKDPANFQYPAESVLAYKEGHLSPDIVAEQKKLEAADLVIFQFPLQWFGVPAILKGWFERVFIGEFAYTYAAMYDKGPFRSKKAVLSITTGGSGSMYSLQGIHGDMNVILWPIQSGILHFCGFQVLEPQLTYSIGHTPADARIQILEGWKKRLENIWDETPLYFAPSSLFDLNFQAGFLMKKEVQDEEKNKKFGLSVGHHLGKSIPTDNQIKARK

SEQ ID NO: 25 - protein, 737 aa, Homo sapiens
  ref <308>: DATABASE ACCESSION NUMBER: sw_hum/dpp3_human
  ref <309>: DATABASE ENTRY DATE: 2001-10-16
MADTQYILPNDIGVSSLDCREAFRLLSPTERLYAYHLSRAAWYGGLAVLLQTSPEAPYIYALLSRLFRAQDPDQLRQHALAEGLTEEEYQAFLVYAAGVYSNMGNYKSFGDTKFVPNLPKEKLERVILGSEAAQQHPEEVRGLWQTCGELMFSLEPRLRHLGLGKEGITTYFSGNCTMEDAKLAQDFLDSQNLSAYNTRLFKEVDGEGKPYYEVRLASVLGSEPSLDSEVTSKLKSYEFRGSPFQVTRGDYAPILQKVVEQLEKAKAYAANSHQGQMLAQYIESFTQGSIEAHKRGSRFWIQDKGPIVESYIGFIESYRDPFGSRGEFEGFVAVVNKAMSAKFERLVASAEQLLKELPWPPTFEKDKFLTPDFTSLDVLTFAGSGIPAGINIPNYDDLRQTEGFKNVSLGNVLAVAYATQREKLTFLEEDDKDLYILWKGPSFDVQVGLHELLGHGSGKLFVQDEKGAFNFDQETVINPETGEQIQSWYRSGETWDSKFSTIASSYEECRAESVGLYLCLHPQVLEIFGFEGADAEDVIYVNWLNMVRAGLLALEFYTPEAFNWRQAHMQARFVILRVLLEAGEGLVTITPTTGSDGRPDARVRLDRSKIRSVGKPALERFLRRLQVLKSTGDVAGGRALYEGYATVTDAPPECFLTLRDTVLLRKESRKLIVQPNTRLEGSDVQLLEYEASAAGLIRSFSERFPEDGPELEEILTQLATADARFWKGPSEAPSGQA

SEQ ID NO: 26 - protein, 328 aa, Homo sapiens
  ref <308>: DATABASE ACCESSION NUMBER: sw_hum/ech1_human
  ref <309>: DATABASE ENTRY DATE: 1997-11-01
MAAGIVASRRLRDLLTRRLTGSNYPGLSISLRLTGSSAQEEASGVALGEAPDHSYESLRVTSAQKHVLHVQLNRPNKRNAMNKVFWREMVECFNKISRDADCRAVVISGAGKMFTAGIDLMDMASDILQPKGDDVARISWYLRDIITRYQETFNVIERCPKPVIAAVHGGCIGGGVDLVTACDIRYCAQDAFFQVKEVDVGLAADVGTLERLPKVIGNQSLVNELAFTAHKMMADEALDSGLVSRVFPDKEVMLDAALPLAPEISSKTTVLVQSTKVNLLYSRDHSVAESLNYVASWNMSMLQTQDLVKSVQPTTENKELKTVTFSKL

SEQ ID NO: 27 - protein, 281 aa, Homo sapiens
  ref <308>: DATABASE ACCESSION NUMBER: sw_hum/ef1d_human
  ref <309>: DATABASE ENTRY DATE: 1993-04-01
MATNFLAHEKIWFDKFKYDDAERRFYEQMNGPVAGASRQENGASVILRDIARARENIQKSLAGSSGPGASSGTSGDHGELVVRIASLEVENQSLRGVVQELQQAISKLEARLNVLEKSSPGHRATAPQTQHVSPMRQVEPPAKKPATPAEDDEDDDIDLFGSDNEEEDKEAAQLREERLRQYAEKKAKKPALVAKSSILLDVKPWDDETDMAQLEACVRSIQLDGLVWGASKLVPVGYGIRKLQIQCVVEDDKVGTDLLEEEITKFEEHVQSVDIAAFNKI

SEQ ID NO: 28 - protein, 458 aa, Homo sapiens [sequence omitted]

SEQ ID NO: 29 - protein, 453 aa, Homo sapiens
  ref <308>: DATABASE ACCESSION NUMBER: sw_hum/fibg_human
  ref <309>: DATABASE ENTRY DATE: 1986-07-21
MSWSLHPRNLILYFYALLFLSSTCVAYVATRDNCCILDERFGSYCPTTCGIADFLSTYQTKVDKDLQSLEDILHQVENKTSEVKQLIKAIQLTYNPDESSKPNMIDAATLKSRKMLEEIMKYEASILTHDSSIRYLQEIYNSNNQKIVNLKEKVAQLEAQCQEPCKDTVQIHDITGKDCQDIANKGAKQSGLYFIKPLKANQQFLVYCEIDGSGNGWTVFQKRLDGSVDFKKNWIQYKEGFGHLSPTGTTEFWLGNEKIHLISTQSAIPYALRVELEDWNGRTSTADYAMFKVGPEADKYRLTYAYFAGGDAGDAFDGFDFGDDPSDKFFTSHNGMQFSTWDNDNDKFEGNCAEQDGSGWWMNKCHAGHLNGVYYQGGTYSKASTPNGYDNGIIWATWKTRWYSMKKTTMKIIPFNRLTIGEGQQHHLGGAKQVRPEHPAETEYDSLYPEDDL

SEQ ID NO: 30 - protein, 482 aa, Homo sapiens [sequence omitted]

SEQ ID NO: 31 - protein, 466 aa, Homo sapiens
  ref <308>: DATABASE ACCESSION NUMBER: sw_humg3bp_human
  ref <309>: DATABASE ENTRY DATE: 2001-10-16
MVMEKPSPLLVGREFVRQYYTLLNQAPDMLHRFYGKNSSYVHGGLDSNGKPADAVYGQKEIHRKVMSQNFTNCHTKIRHVDAHATLNDGVVVQVMGLLSNNNQALRRFMQTFVLAPEGSVANKFYVHNDIFRYQDEVFGGFVTEPQEESEEEVEEPEERQQTPEVVPDDSGTFYDQAVVSNDMEEHLEEPVAEPEPDPEPEPEQEPVSEIQEEKPEPVLEETAPEDAQKSSSPAPADIAQTVQEDLRTFSWASVTSKNLPPSGAVPVTGIPPHVVKVPASQPRPESKPESQIPPQRPQRDQRVREQRINIPPQRGPRPIREAGEQGDIEPRRMVRHPDSHQLFIGNLPHEVDKSELKDFFQSYGNVVELRINSGGKLPNFGFVVFDDSEPVQKVLSNRPIMFRGEVRLNVEEKKTRAAREGDRRDNRLRGPGGPRGGLGGGMRGPPRGGMVQKPGFGVGRGLAPRQ

SEQ ID NO: 32 - protein, 514 aa, Homo sapiens
  ref <308>: DATABASE ACCESSION NUMBER: sw_hum/g6pd_human
  ref <309>: DATABASE ENTRY DATE: 1989-10-01
AEQVALSRTHVCGILREELFQGDAFHQSDTHIFIIMGASGDLAKKKIYPTIWWLFRDGLLPENTFIVGYARSRLTVADIRKQSEPFFKATPEEKLKLEDFFARNSYVAGQYDDAASYQRLNSHMNALHLGSQANRLFYLALPPTVYEAVTKNIHESCMSQIGWNRIIVEKPFGRDLQSSDRLSNHISSLFREDQIYRIDHYLGKEMVQNLMVLRFANRIFGPIWNRDNIACVILTFKEPFGTEGRGGYFDEFGIIRDVMQNHLLQMLCLVAMEKPASTNSDDVRDEKVKVLKCISEVQANNVVLGQYVGNPDGEGEATKGYLDDPTVPRGSTTATFAAVVLYVENERWDGVPFILRCGKALNERKAEVRLQFHDVAGDIFHQQCKRNELVIRVQPNEAVYTKMMTKKPGMFFNPEESELDLTYGNRYKNVKLPDAYERLILDVFCGSQMHFVRSDELREAWRIFTPLLHQIELEKPKPIPYIYGSRGPTEADELMKRVGFQYEGTYKWVNPHKL

SEQ ID NO: 33 - protein, 236 aa, Homo sapiens
  ref <308>: DATABASE ACCESSION NUMBER: sw_hum/gamt_human
  ref <309>: DATABASE ENTRY DATE: 1997-11-01
MSAPSATPIFAPGENCSPAWGAAPAAYDAADTHLRILGKPVMERWETPYMHALAAAASSKGGRVLEVGFGMAIAASKVQEAPIDEHWIIECNDGVFQRLRDWAPRQTHKVIPLKGLWEDVAPTLPDGHFDGILYDTYPLSEETWHTHQFNFIKNHAFRLLKPGGVLTYCNLTSWGELMKSKYSDITIMFEETQVPALLEAGFRRENIRTEVMALVPPADCRYYAFPQMITPLVTKG

SEQ ID NO: 34 - protein, 424 aa, Homo sapiens
  ref <308>: DATABASE ACCESSION NUMBER: sw_hum/grf1_human
  ref <309>: DATABASE ENTRY DATE: 1997-11-01
MAGTRWVLGALLRGCGCNCSSCRRTGAACLPFYSAASYPALRASLLPQSLAAAAAVPTRSYSQESKTTYLEDLPPPPEYELAPSKLEEEVDDVFLIRAQGLPWSCTMEDVLNFFSDCRIRNGENGIHFLLNRDGKRRGDALIEMESEQDVQKALEKHRMYMGQRYVEVYEINNEDVDALMKSLQVKSSPVVNDGVVRLRGLPYSCNEKDIVDFFAGLNIVDITFVMDYRGRRKTGEAYVQFEEPEMANQALLKHREEIGNRYIEIFPSRRNEVRTHVGSYKGKKIASFPTAKYITEPEMVFEEHEVNEVFQPMTAFESEKEIELPKEVPEKLPEAADFGTTSSLHFVHMRGLPFQANAQDIINFFAPLKPVRITMEYSSSGKATGEADVHFETHEDAVAAMLKDRSHVHHRYIELFLNSCPKGK

SEQ ID NO: 35 - protein, 241 aa, Homo sapiens
  ref <308>: DATABASE ACCESSION NUMBER: sw_hum/gto1_hum
  ref <309>: DATABASE ENTRY DATE: 1999-07-15
MSGESARSLGKGSAPPGPVPEGSIRIYSMRFCPFAERTRLVLKAKGIRHEVININLKNKPEWFFKKNPFGLVPVLENSQGQLIYESAITCEYLDEAYPGKKLLPDDPYEKACQKMILELFSKVPSLVGSFIRSQNKEDYAGLKEEFRKEFTKLEEVLTNKKTTFFGGNSISMIDYLIWPWFERLEAMKLNECVDHTPKLKLWMAAMKEDPTVSALLTSEKDWQGFLELYLQNSPEACDYGL

SEQ ID NO: 36 - protein, 858 aa, Homo sapiens
  ref <308>: DATABASE ACCESSION NUMBER: sw_hum/h105_human
  ref <309>: DATABASE ENTRY DATE: 1997-11-01
MSVVGLDVGSQSCYIAVARAGGIETIANEFSDRCTPSVISFGSKNRTIGVAAKNQQITHANNTVSNFKRFHGRAFNDPFIQKEKENLSYDLVPLKNGGVGIKVMYMGEEHLFSVEQITAMLLTKLKETAENSLKKPVTDCVISVPSFFTDAERRSVLDAAQIVGLNCLRLMNDMTAVALNYGIYKQDLPSLDEKPRIVVFVDMGHSAFQVSACAFNKGKLKVLGTAFDPFLGGKNFDEKLVEHFCAEFKTKYKLDAKSKIRALLRLYQECEKLKKLMSSNSTDLPLNIECFMNDKDVSGKMNRSQFEELCAELLQKIEVPLYSLLEQTHLKVEDVSAVEIVGGATRIPAVKERIAKFFGKDISTTLNADEAVARGCALQCAILSPAFKVREFSVTDAVPFPISLIWNHDSEDTEGVHEVFSRNHAAPFSKVLTFLRRGPFELEAFYSDPQGVPYPEAKIGRFVVQNVSAQKDGEKSRVKVKVRVNTHGIFTISTASMVEKVPTEENEMSSEADMECLNQRPPENPDTDKNVQQDNSEAGTQPQVQTDAQQTSQSPPSPELTSEENKIPDADKANEKKVDQPPEAKKPKIKVVNVELPIEANLVWQLGKDLLNMYIETEGKMIMQDKLEKERNDAKNAVEEYVYEFRDKLCGPYEKFICEQDHQNFLRLLTETEDWLYEEGEDQAKQAYVDKLEELMKIGTPVKVRFQEAEERPKMFEELGQRLQHYAKIAADFRNKDEKYNHIDESEMKKVEKSVNEVMEWMNNVMNAQAKKSLDQDPVVRAQEIKTKIKELNNTCEPVVTQPKPKIESPKLERTPNGPNIDKKEEDLEDKNNFGAEPPHQNGECYPNEKNSVNMDLD

SEQ ID NO: 37 - protein, 240 aa, Homo sapiens
  ref <308>: DATABASE ACCESSION NUMBER: sw_hum/hdgf_human
  ref <309>: DATABASE ENTRY DATE: 1996-10-01
MSRSNRQKEYKCGDLVFAKMKGYPHWPARIDEMPEAAVKSTANKYQVFFFGTHETAFLGPKDLFPYEESKEKFGKPNKRKGFSEGLWEIENNPTVKASGYQSSQKKSCVEEPEPEPEAAEGDGDKKGNAEGSSDEEGKLVIDEPAKEKNEKGALKRRAGDLLEDSPKRPKEAENPEGEEKEAATLEVERPLPMEVEKNSTPSEPGSGRGPPQEEEEEEDEEEEATKEDAEAPGIRDHESL

SEQ ID NO: 38 - protein, 520 aa, Homo sapiens
  ref <308>: DATABASE ACCESSION NUMBER: sw_hum/hmcs_human
  ref <309>: DATABASE ENTRY DATE: 1993-07-01
MPGSLPLNAEACWPKDVGIVALEIYFPSQYVDQAELEKYDGVDAGKYTIGLGQAKMGFCTDREDINSLCMTVVQNLMERNNLSYDCIGRLEVGTETIIDKSKSVKTNLMQLFEESGNTDIEGIDTTNACYGGTAAVFNAVNWIESSSWDGRYALVVAGDIAVYATGNARPTGGVGAVALLIGPNAPLIFERGLRGTHMQHAYDFYKPDMLSEYPIVDGKLSIQCYLSALDRCYSVYCKKIHAQWQKEGNDKDFTLNDFGFMIFHSPYCKLVQKSLARMLLNDFLNDQNRDKNSIYSGLEAFGDVKLEDTYFDRDVEKAFMKASSELFSQKTKASLLVSNQNGNMYTSSVYGSLASVLAQYSPQQLAGKRIGVFSYGSGLAATLYSLKVTQDATPGSALDKITASLCDLKSRLDSRTGVAPDVFAENMKLREDTHHLVNYIPQGSIDSLFEGTWYLVRVDEKHRRTYARRPTPNDDTLDEGVGLVHSNIATEHIPSPAKKVPRLPATAAEPEAAVISNGEH

SEQ ID NO: 39 - protein, 314 aa, Homo sapiens
  ref <308>: DATABASE ACCESSION NUMBER: sw_hum/if2a_human
  ref <309>: DATABASE ENTRY DATE: 1987-08-13
PGLSCRFYQHKFPEVEDVVMVNVRSIAEMGAYVSLLEYNNIEGMILLSELSRRRIRSINKLIRIGRNECVVVIRVDKEKGYIDLSKRRVSPEEAIKCEDKFTKSKTVYSILRHVAEVLEYTKDEQLESLFQRTAWVFDDKYKRPGYGAYDAFKHAVSDPSILDSLDLNEDEREVLINNINRRLTPQAVKIRADIEVACYGYEGIDAVKEALRAGLNCSTENMPIKINLIAPPRYVMTTTTLERTEGLSVLSQAMAVIKEKIEEKRGVFNVQMEPKVVTDTDETELARQMERLERENAEVDGDDDAEEMEAKAED

SEQ ID NO: 40 - protein, 352 aa, Homo sapiens
  ref <308>: DATABASE ACCESSION NUMBER: sw_hum/if33_human
  ref <309>: DATABASE ENTRY DATE: 2000-05-30
MASRKEGTGSTATSSSSTAGAAGKGKGKGGSGDSAVKQVQIDGLVVLKIIKHYQEEGQGTEVVQGVLLGLVVEDRLEITNCFPFPQHTEDDADFDEVQYQMEMMRSLRHVNIDHLHVGWYQSTYYGSFVTRALLDSQFSYQHAIEESVVLIYDPIKTAQGSLSLKAYRLTPKLMEVCKEKDFSPEALKKANITFEYMFEEVPIVIKNSHLINVLMWELEKKSAVADKHELLSLASSNHLGKNLQLLMDRVDEMSQDIVKYNTYMRNTSKQQQQKHQYQQRRQQENMQRQSRGEPPLPEEDLSKLFKPPQPPARMDSLLIAGQINTYCQNIKEFTAQNLGKLFMAQALQEYNN

SEQ ID NO: 41 - protein, 406 aa, Homo sapiens
  ref <308>: DATABASE ACCESSION NUMBER: sw_hum/if41_human
  ref <309>: DATABASE ENTRY DATE: 1987-08-13
MSASQDSRSRDNGPDGMEPEGVIESNWNEIVDSFDDMNLSESLLRGIYAYGFEKPSAIQQRAILPCIKGYDVIAQAQSGTGKTATFAISILQQIELDLKATQALVLAPTRELAQQIQKVVMALGDYMGASCHACIGGTNVRAEVQKLQMEAPHIIVGTPGRVFDMLNRRYLSPKYIKMFVLDEADEMLSRGFKDQIYDIFQKLNSNTQVVLLSATMPSDVLEVTKKFMRDPIRILVKKEELTLEGIRQFYINVEREEWKLDTLCDLYETLTITQAVIFINTRRKVDWLTEKMHARDFTVSAMHGDMDQKERDVIMREFRSGSSRVLITTDLLARGIDVQQVSLVINYDLPTNRENYIHRIGRGGRFGRKGVAINMVTEEDKRTLRDIETFYNTSIEEMPLNVADLI

SEQ ID NO: 42 - protein, 585 aa, Homo sapiens
  ref <308>: DATABASE ACCESSION NUMBER: sw_hum/lam1_human
  ref <309>: DATABASE ENTRY DATE: 1991-02-01
ATATPVPPRMGSRAGGPTTPLSPTRLSRLQEKEELRELNDRLAVYIDKVRSLETENSALQLQVTEREEVRGRELTGLKALYETELADARRALDDTARERAKLQIELGKCKAEHDQLLLNYAKKESDLNGAQIKLREYEAALNSKDAALATALGDKKSLEGDLEDLKDQIAQLEASLAAAKKQLADETLLKVDLENRCQSLTEDLEFRKSMYEEEINETRRKHETRLVEVDSGRQIEYEYKLAQALHEMREQHDAQVRLYKEELEQTYHAKLENARLSSEMNTSTVNSAREELMESRMRIESLSSQLSNLQKESRACLERIQELEDLLAKEKDNSRRMLTDKEREMAEIRDQMQQQLNDYEQLLDVKLALDMEISAYRKLLEGEEERLKLSPSPSSRVTVSRASSSRSVRTTRGKRKRVDVEESEASSSVSISHSASATGNVCIEEIDVDGKFIRLKNTSEQDQPMGGWEMIRKIGDTSVSYKYTSRYVLKAGQTVTIWAANAGVTASPPTDLIWKNQNSWGTGEDVKVILKNSQGEEVAQRSTVFKTTIPEEEEEEEEAAGVVVEEELFHQQGTPRASNRSCAIM

SEQ ID NO: 43 - protein, 600 aa, Homo sapiens
  ref <308>: DATABASE ACCESSION NUMBER: sw_hum/lam2_human
  ref <309>: DATABASE ENTRY DATE: 1994-06-01
MATPLPGRAGGPATPLSPTRLSRLQEKEELRELNDRLAHYIDRVRALELENDRLLLKISEKEEVTTREVSGIKALYESELADARRVLDETARERARLQIEIGKLRAELDEVNKSAKKREGELTVAQGRVKDLESLFHRSEVELAAALSDKRGLESDVAELRAQLAKAEDGHAVAKKQLEKETLMRVDLENRCQSLQEELDFRKSVFEEEVRETRRRHERRLVEVDSSRQQEYDFKMAQALEELRSQHDEQVRLYKLELEQTYQAKLDSAKLSSDQNDKAASAAREELKEARMRLESLSYQLSGLQKQASAAEDRIRELEEAMAGERDKFRKMLDAKEQEMTEMRDVMQQQLAEYQELLDVKLALDMEINAYRKLLEGEEERLKLSPSPSSRVTVSRATSSSSGSLSATGRLGRSKRKRLEVEEPLGSGPSVLGTGTGGSGGFHLAQQASASGSVSIEEIDLEGKFVQLKNNSDKDQSLGNWRIKRQVLEGEEIAYKFTPKYILRAGQMVTVWAAGAGVAHSPPSTLVWKGQSSWGTGESFRTVLVNADGEEVAMRTVKKSSVMRENENGEEEEEEAEFGEEDLFHQQGDPRTTSRGCYVM

SEQ ID NO: 44 - protein, 664 aa, Homo sapiens
  ref <308>: DATABASE ACCESSION NUMBER: sw_hum/lama_human
  ref <309>: DATABASE ENTRY DATE: 1986-07-21
METPSQRRATRSGAQASSTPLSPTRITRLQEKEDLQELNDRLAVYIDRVRSLETENAGLRLRITESEEVVSREVSGIKAAYEAELGDARKTLDSVAKERARLQLELSKVREEFKELKARNTKKEGDLIAAQARLKDLEALLNSKEAALSTALSEKRTLEGELHDLRGQVAKLEAALGEAKKQLQDEMLRRVDAENRLQTMKEELDFQKNIYSEELRETKRRHETRLVEIDNGKQREFESRLADALQELRAQHEDQVEQYKKELEKTYSAKLDNARQSAERNSNLVGAAHEELQQSRIRIDSLSAQLSQLQKQLAAKEAKLRDLEDSLARERDTSRRLLAEKEREMAEMRARMQQQLDEYQELLDIKLALDMEIHAYRKLLEGEEERLRLSPSPTSQRSRGRASSHSSQTQGGGSVTKKRKLESTESRSSFSQHARTSGRVAVEEVDEEGKFVRLRNKSNEDQSMGNWQIKRQNGDDPLLTYRFPPKFTLKAGQVVTIWAAGAGATHSPPTDLVWKAQNTWGCGNSLRTALINSTGEEVAMRKLVRSVTVVEDDEDEDGDDLLHHHHGSHCSSSGDPAEYNLRSRTVLCGTCGQPADKASASGSGAQVGGPISSGSSASSVTVTRSYRSVGGSGGGSFGDNLVTRSYLLGNSSPRTQSPQNCSIM

SEQ ID NO: 45 - protein, 331 aa, Homo sapiens
  ref <308>: DATABASE ACCESSION NUMBER: sw_hum/ldha_human
  ref <309>: DATABASE ENTRY DATE: 1986-07-21
ATLKDQLIYNLLKEEQTPQNKITVVGVGAVGMACAISILMKDLADELALVDVIEDKLKGEMMDLQHGSLFLRTPKIVSGKDYNVTANSKLVIITAGARQQEGESRLNLVQRNVNIFKFIIPNVVKYSPNCKLLIVSNPVDILTYVAWKISGFPKNRVIGSGCNLDSARFRYLMGERLGVHPLSCHGWVLGEHGDSSVPVWSGMNVAGVSLKTLHPDLGTDKDKEQWKEVHKQVVESAYEVIKLKGYTSWAIGLSVADLAESIMKNLRRVHPVSTMIKGLYGIKDDVFLSVPCILGQNGISDLVKVTLTSEEEARLKKSADTLWGIQKELQF

SEQ ID NO: 46 - protein, 268 aa, Homo sapiens
  ref <308>: DATABASE ACCESSION NUMBER: sw_hum/mae1_human
  ref <309>: DATABASE ENTRY DATE: 2003-02-28
MAVNVYSTSVTSDNLSRHDMLAWINESLQLNLTKIEQLCSGAAYCQFMDMLFPGSIALKKVKFQAKLEHEYIQNFKILQAGFKRMGVDKIIPVDKLVKGKFQDNFEFVQWFKKFFDANYDGKDYDPVAARQGQETAVAPSLVAPALNKPKKPLTSSSAAPQRPISTQRTAAAPKAGPGVVRKNPGVGNGDDEAAELMQQVNVLKLTVEDLEKERDFYFGKLRNIELICQENEGENDPVLQRIVDILYATDEGFVIPDEGGPQEEQEEY

SEQ ID NO: 47 - protein, 572 aa, Homo sapiens
  ref <308>: DATABASE ACCESSION NUMBER: sw_hum/maox_human
  ref <309>: DATABASE ENTRY DATE: 1996-02-01
MEPEAPRRRHTHQRGYLLTRNPHLNKDLAFTLEERQQLNIHGLLPPSFNSQEIQVLRVVKNFEHLNSDFDRYLLLMDLQDRNEKLFYRVLTSDIEKFMPIVYTPTVGLACQQYSLVFRKPRGLFITIHDRGHIASVLNAWPEDVIKAIVVTDGERILGLGDLGCNGMGIPVGKLALYTACGGMNPQECLPVILDVGTENEELLKDPLYIGLRQRRVRGSEYDDFLDEFMEAVSSKYGMNCLIQFEDFANVNAFRLLNKYRNQYCTFNDDIQGTASVAVAGLLAALRITKNKLSDQTILFQGAGEAALGIAHLIVMALEKEGLPKEKAIKKIWLVDSKGLIVKGRASLTQEKEKFAHEHEEMKNLEAIVQEIKPTALIGVAAIGGAFSEQILKDMAAFNERPIIFALSNPTSKAECSAEQCYKITKGRAIFASGSPFDPVTLPNGQTLYPGQGNNSYVFPGVALGVVACGLRQITDNIFLTTAEVIAQQVSDKHLEEGRLYPPLNTIRDVSLKIAEKIVKDAYQEKTATVYPEPQNKEAFVRSQMYSTDYDQILPDCYSWPEEVQKIQTKVDQ

SEQ ID NO: 48 - protein, 333 aa, Homo sapiens
  ref <308>: DATABASE ACCESSION NUMBER: sw_hum/mdhc_human
  ref <309>: DATABASE ENTRY DATE: 1995-02-01
SEPIRVLVTGAAGQIAYSLLYSIGNGSVFGKDQPIILVLLDITPMMGVLDGVLMELQDCALPLLKDVIATDKEDVAFKDLDVAILVGSMPRREGMERKDLLKANVKIFKSQGAALDKYAKKSVKVIVVGNPANTNCLTASKSAPSIPKENFSCLTRLDHNRAKAQIALKLGVTANDVKNVIIWGNHSSTQYPDVNHAKVKLQGKEVGVYEALKDDSWLKGEFVTTVQQRGAAVIKARKLSSAMSAAKAICDHVRDIWFGTPEGEFVSMGVISDGNSYGVPDDLLYSFPVVIKNKTWKFVEGLPINDFSREKMDLTAKELTEEKESAFEFLSSA

SEQ ID NO: 49 - protein, 152 aa, Homo sapiens
  ref <308>: DATABASE ACCESSION NUMBER: sw_hum/ndka_human
  ref <309>: DATABASE ENTRY DATE: 1990-04-01
MANCERTFIAIKPDGVQRGLVGEIIKRFEQKGFRLVGLKFMQASEDLLKEHYVDLKDRPFFAGLVKYMHSGPVVAMVWEGLNVVKTGRVMLGETNPADSKPGTIRGDFCIQVGRNIIHGSDSVESAEKEIGLWFHPEELVDYTSCAQNWIYE

SEQ ID NO: 50 - protein, 394 aa, Homo sapiens
  ref <308>: DATABASE ACCESSION NUMBER: sw_hum/ndr1_human
  ref <309>: DATABASE ENTRY DATE: 1999-07-15
MSREMQDVDLAEVKPLVEKGETITGLLQEFDVQEQDIETLHGSVHVTLCGTPKGNRPVILTYHDIGMNHKTCYNPLFNYEDMQEITQHFAVCHVDAPGQQDGAASFPAGYMYPSMDQLAEMLPGVLQQFGLKSIIGMGTGAGAYILTRFALNNPEMVEGLVLINVNPCAEGWMDWAASKISGWTQALPDMVVSHLFGKEEMQSNVEVVHTYRQHIVNDMNPGNLHLFINAYNSRRDLEIERPMPGTHTVTLQCPALLVVGDSSPAVDAVVECNSKLDPTKTTLLKMADCGGLPQISQPAKLAEAFKYFVQGMGYMPSASMTRLMRSRTASGSSVTSLDGTRSRSHTSEGTRSRSHTSEGTRSRSHTSEGAHLDITPNSGAAGNSAGPKSMEVSC

SEQ ID NO: 51 - protein, 261 aa, Homo sapiens
  ref <308>: DATABASE ACCESSION NUMBER: sw_hum/pcna_human
  ref <309>: DATABASE ENTRY DATE: 1989-10-01
MFEARLVQGSILKKVLEALKDLINEACWDISSSGVNLQSMDSSHVSLVQLTLRSEGFDTYRCDRNLAMGVNLTSMSKILKCAGNEDIITLRAEDNADTLALVFEAPNQEKVSDYEMKLMDLDVEQLGIPEQEYSCVVKMPSGEFARICRDLSHIGDAVVISCAKDGVKFSASGELGNGNIKLSQTSNVDKEEEAVTIEMNEPVQLTFALRYLNFFTKATPLSSTVTLSMSADVPLVVEYKIADMGHLKYYLAPKIEDEEGS

SEQ ID NO: 52 - protein, 417 aa, Homo sapiens
  ref <308>: DATABASE ACCESSION NUMBER: sw_hum/pgk1_human
  ref <309>: DATABASE ENTRY DATE: 1986-07-21
SLSNKLTLDKLDVKGKRVVMRVDFNVPMKNNQITNNQRIKAAVPSIKFCLDNGAKSVVLMSHLGRPDGVPMPDKYSLEPVAVELKSLLGKDVLFLKDCVGPEVEKACANPAAGSVILLENLRFHVEEEGKGKDASGNKVKAEPAKIEAFRASLSKLGDVYVNDAFGTAHRAHSSMVGVNLPQKAGGFLMKKELNYFAKALESPERPFLAILGGAKVADKIQLINNMLDKVNEMIIGGGMAFTFLKVLNNMEIGTSLFDEEGAKIVKDLMSKAEKNGVKITLPVDFVTADKFDENAKTGQATVASGIPAGWMGLDCGPESSKKYAEAVTRAKQIVWNGPVGVFEWEAFARGTKALMDEVVKATSRGCITIIGGGDTATCCAKWNTEDKVSHVSTGGGASLELLEGKVLPGVDALSNIL

SEQ ID NO: 53 - protein, 418 aa, Homo sapiens
  ref <308>: DATABASE ACCESSION NUMBER: sw_hum/prs6_human
  ref <309>: DATABASE ENTRY DATE: 1995-11-01
MEEIGILVEKAQDEIPALSVSRPQTGLSFLGPEPEDLEDLYSRYKKLQQELEFLEVQEEYIKDEQKNLKKEFLHAQEEVKRIQSIPLVIGQFLEAVDQNTAIVGSTTGSNYYVRILSTIDRELLKPNASVALHKHSNALVDVLPPEADSSIMMLTSDQKPDVMYADIGGMDIQKQEVREAVELPLTHFELYKQIGIDPPRGVLMYGPPGCGKTMLAKAVAHHTTAAFIRVVGSEFVQKYLGEGPRMVRDVFRLAKENAPAIIFIDEIDAIATKRFDAQTGADREVQRILLELLNQMDGFDQNVNVKVIMATNRADTLDPALLRPGRLDRKIEFPLPDRRQKRLIFSTITSKMNLSEEVDLEDYVARPDKISGADINSICQESGMLAVRENRYIVLAKDFEKAYKTVIKKDEQEHEFYK

SEQ ID NO: 54 - protein, 277 aa, Homo sapiens
  ref <308>: DATABASE ACCESSION NUMBER: sw_hum/psb7_human
  ref <309>: DATABASE ENTRY DATE: 2001-10-16
MAAVSVYAPPVGGFSFDNCRRNAVLEADFAKRGYKLPKVRKTGTTIAGVVYKDGIVLGADTRATEGMVVADKNCSKIHFISPNIYCCGAGTAADTDMTTQLISSNLELHSLSTGRLPRVVTANRMLKQMLFRYQGYIGAALVLGGVDVTGPHLYSIYPHGSTDKLPYVTMGSGSLAAMAVFEDKFRPDMEEEEAKNLVSEAIAAGIFNDLGSGSNIDLCVISKNKLDFLRPYTVPNKKGTRLGRYRCEKGTTAVLTEKITPLEIEVLEETVQTMDTS

SEQ ID NO: 55 - protein, 409 aa, Homo sapiens
  ref <308>: DATABASE ACCESSION NUMBER: sw_hum/r23b_human
  ref <309>: DATABASE ENTRY DATE: 1996-10-01
MQVTLKTLQQQTFKIDIDPEETVKALKEKIESEKGKDAFPVAGQKLIYAGKILNDDTALKEYKIDEKNFVVVMVTKPKAVSTPAPATTQQSAPASTTAVTSSTTTTVAQAPTPVPALAPTSTPASITPASATASSEPAPASAAKQEKPAEKPAETPVATSPTATDSTSGDSSRSNLFEDATSALVTGQSYENMVTEIMSMGYEREQVIAALRASFNNPDRAVEYLLMGIPGDRESQAVVDPPQAASTGAPQSSAVAAAAATTTATTTTTSSGGHPLEFLRNQPQFQQMRQIIQQNPSLLPALLQQIGRENPQLLQQISQHQEHFIQMLNEPVQEAGGQGGGGGGGSGGIAEAGSGHMNYIQVTPQEKEAIERLKALGFPEGLVIQAYFACEKNENLAANFLLQQNFDED

SEQ ID NO: 56 - protein, 306 aa, Homo sapiens
  ref <308>: DATABASE ACCESSION NUMBER: sw_hum/roc_human
  ref <309>: DATABASE ENTRY DATE: 1988-08-01
MASNVTNKTDPRSMNSRVFIGNLNTLVVKKSDVEAIFSKYGKIVGCSVHKGFAFVQYVNERNARAAVAGEDGRMIAGQVLDINLAAEPKVNRGKAGVKRSAAEMYGSVTEHPSPSPLLSSSFDLDYDFQRDYYDRMYSYPARVPPPPPIARAVVPSKRQRVSGNTSRRGKSGFNSKSGQRGSSKSGKLKGDDLQAIKKELTQIKQKVDSLLENLEKMEKEQSKQAVEMKNDKSEEEQSSSSVKKDETNVKMESEGGADDSAEEGDLLDDDDNEDRGDDQLELIKDDEKEAEEGEDDRDSANGEDDS

SEQ ID NO: 57 - protein, 449 aa, Homo sapiens
  ref <308>: DATABASE ACCESSION NUMBER: sw_hum/roh2_human
  ref <309>: DATABASE ENTRY DATE: 1997-11-01
MMLSTEGREGFVVKVRGLPWSCSADEVMRFFSDCKIQNGTSGIRFIYTREGRPSGEAFVELESEEEVKLALKKDRETMGHRYVEVFKSNSVEMDWVLKHTGPNSPDTANDGFVRLRGLPFGCSKEEIVQFFSGLEIVPNGMTLPVDFQGRSTGEAFVQFASQEIAEKALKKHKERIGHRYIEIFKSSRAEVRTHYDPPRKLMAMQRPGPYDRPGAGRGYNSIGRGAGFERMRRGAYGGGYGGYDDYGGYNDGYGFGSDRFGRDLNYCFSGMSDHRYGDGGSSFQSTTGHCVHMRGLPYRATENDIYNFFSPLNPMRVHIEIGPDGRVTGEADVEFATHEDAVAAMAKDKANMQHRYVELFLNSTAGTSGGAYDHSYVELFLNSTAGASGGAYGSQMMGGMGLSNQSSYGGPASQQLSGGYGGGYGGQSSMSGYDQVLQENSSDYQSNLA

SEQ ID NO: 58 - protein, 346 aa, Homo sapiens
  ref <308>: DATABASE ACCESSION NUMBER: sw_hum/roh3_human
  ref <309>: DATABASE ENTRY DATE: 1993-07-01
MDWVMKHNGPNDASDGTVRLRGLPFGCSKEEIVQFFQGLEIVPNGITLTMDYQGRSTGEAFVQFASKEIAENALGKHKERIGHRYIEIFRSSRSEIKGFYDPPRRLLGQRPGPYDRPIGGRGGYYGAGRGSMYDRMRRGGDGYDGGYGGFDDYGGYNNYGYGNDGFDDRMRDGRGMGGHGYGGAGDASSGFHGGHFVHMRGLPFRATENDIANFFSPLNPIRVHIDIGADGRATGEADVEFVTHEDAVAAMSKDKNNMQHRYIELFLNSTPGGGSGMGGSGMGGYGRDGMDNQGGYGSVGRMGMGNNYSGGYGTPDGLGGYGRGGGGSGGYYGQGGMSGGGWRGMY

SEQ ID NO: 59 - protein, 322 aa, Homo sapiens
  ref <308>: DATABASE ACCESSION NUMBER: sw_hum/sc13_human
  ref <309>: DATABASE ENTRY DATE: 1997-11-01
MVSVINTVDTSHEDMIHDAQMDYYGTRLATCSSDRSVKIFDVRNGGQILIVDLRGHEGPVWQVAWAHPMYGNILASCSYDRKVIIWREENGTWEKSHEHAGHDSSVNSVCWAPHDYGLILACGSSDGAISLLTYTGEGQWEVKKINNAHTIGCNAVSWAPAVVPGSLIDHPSGQKPNYIKRFASGGCDNLIKLWKEEEDGQWKEEQKLEAHSDWVRDVAWAPSIGLPTSTIASCSQDGRVFIWTCDDASSNTWSPKLLHKFNDVVWHVSWSITANILAVSGGDNKVTLWKESVDGQWVCISDVNKGQGSVSASVTEGQQNEQ

SEQ ID NO: 60 - protein, 295 aa, Homo sapiens
  ref <308>: DATABASE ACCESSION NUMBER: sw_hum/snaa_human
  ref <309>: DATABASE ENTRY DATE: 1996-10-01
MDNSGKEAEAMALLAEAERKVKNSQSFFSGLFGGSSKIEEACEIYARAANMFKMAKNWSAAGNAFCQAAQLHLQLQSKHDAATCFVDAGNAFKKADPQEAINCLMRAIEIYTDMGRFTIAAKHHISIAEIYETELVDIEKAIAHYEQSADYYKGEESNSSANKCLLKVAGYAALLEQYQKAIDIYEQVGTNAMDTPLLKYSAKDYFFKAALCHFCIDMLNAKLAVQKYEELFPAFSDSRECKLMKKLLEAHEEQNVDSYTESVKEYDSISRLDQWLTTMLLRIKKTIQGDEEDLR

SEQ ID NO: 61 - protein, 302 aa, Homo sapiens
  ref <308>: DATABASE ACCESSION NUMBER: sw_hum/spee_human
  ref <309>: DATABASE ENTRY DATE: 1991-02-01
MEPGPDGPAASGPAAIREGWFRETCSLWPGQALSLQVEQLLHHRRSRYQDILVFRSKTYGNVLVLDGVIQCTERDEFSYQEMIANLPLCSHPNPRKVLIIGGGDGGVLREVVKHPSVESVVQCEIDEDVIQVSKKFLPGMAIGYSSSKLTLHVGDGFEFMKQNQDAFDVIITDSSDPMGPAESLFKESYYQLMKTALKEDGVLCCQGECQWLHLDLIKEMRQFCQSLFPVVAYAYCTIPTYPSGQIGFMLCSKNPSTNFQEPVQPLTQQQVAQMQLKYYNSDVHRAAFVLPEFARKALNDVS

SEQ ID NO: 62 - protein, 623 aa, Homo sapiens
  ref <308>: DATABASE ACCESSION NUMBER: sw_hum/tkt_human
  ref <309>: DATABASE ENTRY DATE: 1992-12-01
MESYHKPDQQKLQALKDTANRLRISSIQATTAAGSGHPTSCCSAAEIMAVLFFHTMRYKSQDPRNPHNDRFVLSKGHAAPILYAVWAEAGFLAEAELLNLRKISSDLDGHPVPKQAFTDVATGSLGQGLGAACGMAYTGKYFDKASYRVYCLLGDGELSEGSVWEAMAFASIYKLDNLVAILDINRLGQSDPAPLQHQMDIYQKRCEAFGWHAIIVDGHSVEELCKAFGQAKHQPTAIIAKTFKGRGITGVEDKESWHGKPLPKNMAEQIIQEIYSQIQSKKKILATPPQEDAPSVDIANIRMPSLPSYKVGDKIATRKAYGQALAKLGHASDRIIALDGDTKNSTFSEIFKKEHPDRFIECYIAEQNMVSIAVGCATRNRTVPFCSTFAAFFTRAFDQIRMAAISESNINLCGSHCGVSIGEDGPSQMALEDLAMFRSVPTSTVFYPSDGVATEKAVELAANTKGICFIRTSRPENAIIYNNNEDFQVGQAKVVLKSKDDQVTVIGAGVTLHEALAAAELLKKEKINIRVLDPFTIKPLDRKLILDSARATKGRILTVEDHYYEGGIGEAVSSAVVGEPGITVTHLAVNRVPRSGKPAELLKMFGIDRDAIAQAVRGLITKA

SEQ ID NO: 63 - protein, 1058 aa, Homo sapiens
  ref <308>: DATABASE ACCESSION NUMBER: w_hum/uba1_human
  ref <309>: DATABASE ENTRY DATE: 1991-08-01
MSSSPLSKKRRVSGPDPKPGSNCSPAQSVLSEVPSVPTNGMAKNGSEADIDEGLYSRQLYVLGHEAMKRLQTSSVLVSGLRGLGVEIAKNIILGGVKAVTLHDQGTAQWADLSSQFYLREEDIGKNRAEVSQPRLAELNSYVPVTAYTGPLVEDFLSGFQVVVLTNTPLEDQLRVGEFCHNRGIKLVVADTRGLFGQLFCDFGEEMILTDSNGEQPLSAMVSMVTKDNPGVVTCLDEARHGFESGDFVSFSEVQGMVELNGNQPMEIKVLGPYTFSICDTSNFSDYIRGGIVSQVKVPKKISFKSLVASLAEPDFVVTDFAKFSRPAQLHIGFQALHQFCAQHGRPPRPRNEEDAAELVALAQAVNARALPAVQQNNLDEDLIRKLAYVAAGDLAPINAFIGGLAAQEVMKACSGKFMPIMQWLYFDALECLPEDKEVLTEDKCLQRQNRYDGQVAVFGSDLQEKLGKQKYFLVGAGAIGCELLKNFAMIGLGCGEGGEIIVTDMDTIEKSNLNRQFLFRPWDVTKLKSDTAAAAVRQMNPHIRVTSHQNRVGPDTERIYDDDFFQNLDGVANALDNVDARMYMDRRCVYYRKPLLESGTLGTKGNVQVVIPFLTESYSSSQDPPEKSIPICTLKNFPNAIEHTLQWARDEFEGLFKQPAENVNQYLTDPKFVERTLRLAGTQPLEVLEAVQRSLVLQRPQTWADCVTWACHHWHTQYSNNIRQLLHNFPPDQLTSSGAPFWSGPKRCPHPLTFDVNNPLHLDYVMAAANLFAQTYGLTGSQDRAAVATFLQSVQVPEFTPKSGVKIHVSDQELQSANASVDDSRLEELKATLPSPDKLPGFKMYPIDFEKDDDSNFHMDFIVAASNLRAENYDIPSADRHKSKLIAGKIIPAIATTTAAVVGLVCLELYKVVQGHRQLDSYKNGFLNLALPFFGFSEPLAAPRHQYYNQEWTLWDRFEVQGLQPNGEEMTLKQFLDYFKTEHKLEITMLSQGVSMLYSFFMPAAKLKERLDQPMTEIVSRVSKRKLGRHVRALVLELCCNDESGEDVEVPYVRYTIR

SEQ ID NO: 64 - protein, 200 aa, Homo sapiens
  ref <308>: DATABASE ACCESSION NUMBER: sw_hum/ubc1_human
  ref <309>: DATABASE ENTRY DATE: 1992-08-01
MANIAVQRIKREFKEVLKSEETSKNQIKVDLVDENFTELRGEIAGPPDTPYEGGRYQLEIKIPETYPFNPPKVRFITKIWHPNISSVTGAICLDILKDQWAAAMTLRTVLLSLQALLAAAEPDDPQDAVVANQYKQNPEMFKQTARLWAHVYAGAPVSSPEYTKKIENLCAMGFDRNAVIVALSSKSWDVETATELLLSN

SEQ ID NO: 65 - protein, 493 aa, Homo sapiens
  ref <308>: DATABASE ACCESSION NUMBER: sw_hum/ubpe_human
  ref <309>: DATABASE ENTRY DATE: 1996-10-01
PLYSVTVKWGKEKFEGVELNTDEPPMVFKAQLFALTGVQPARQKVMVKGGTLKDDDWGNIKIKNGMTLLMMGSADALPEEPSAKTVFVEDMTEEQLASAMELPCGLTNLGNTCYMNATVQCIRSVPELKDALKRYAGALRASGEMASAQYITAALRDLFDSMDKTSSSIPPIILLQFLHMAFPQFAEKGEQGQYLQQDANECWIQMMRVLQQKLEAIEDDSVKETDSSSASAATPSKKKSLIDQFFGVEFETTMKCTESEEEEVTKGKENQLQLSCFINQEVKYLFTGLKLRLQEEITKQSPTLQRNALYIKSSKISRLPAYLTIQMVRFFYKEKESVNAKVLKDVKFPLMLDMYELCTPELQEKMVSFRSKFKDLEDKKVNQQPNTSDKKSSPQKEVKYEPFSFADDIGSNNCGYYDLQAVLTHQGRSSSSGHYVSWVKRKQDEWIKFDDDKVSIVTPEDILRLSGGGDWHIAYVLLYGPRRVEIMEEESEQ

SEQ ID NO: 66 - protein, 350 aa, Homo sapiens
  ref <308>: DATABASE ACCESSION NUMBER: sw_hum/unri_human
  ref <309>: DATABASE ENTRY DATE: 2001-10-16
MAMRQTPLTCSGHTRPVVDLAFSGITPYGYFLISACKDGKPMLRQGDTGDWIGTFLGHKGAVWGATLNKDATKAATAAADFTAKVWDAVSGDELMTLAHKHIVKTVDFTQDSNYLLTGGQDKLLRIYDLNKPEAEPKEISGHTSGIKKALWCSEDKQILSADDKTVRLWDHATMTEVKSLNFNMSVSSMEYIPEGEILVITYGRSIAFHSAVSLDPIKSFEAPATINSASLHPEKEFLVAGGEDFKLYKYDYNSGEELESYKGHFGPIHCVRFSPDGELYASGSEDGTLRLWQTVVGKTYGLWKCVLPEEDSGELAKPKIGFPETTEEELEEIASENSDCIFPSAPDVKA

SEQ ID NO: 67 - protein, 617 aa, Homo sapiens
  ref <308>: DATABASE ACCESSION NUMBER: sw_hum/vaa1_human
  ref <309>: DATABASE ENTRY DATE: 1994-10-01
MDFSKLPKILDEDKESTFGYVHGVSGPVVTACDMAGAAMYELVRVGHSELVGEIIRLEGDMATIQVYEETSGVSVGDPVLRTGKPLSVELGPGIMGAIFDGIQRPLSDISSQTQSIYIPRGVNVSALSRDIKWDFTPCKNLRVGSHITGGDIYGIVSENSLIKHKIMLPPRNRGTVTYIAPPGNYDTSDVVLELEFEGVKEKFTMVQVWPVRQVRPVTEKLPANHPLLTGQRVLDALFPCVQGGTTAIPGAFGCGKTVISQSLSKYSNSDVIIYVGCGERGNEMSEVLRDFPELTMEVDGKVESIMKRTALVANTSNMPVAAREASIYTGITLSEYFRDMGYHVSMMADSTSRWAEALREISGRLAEMPADSGYPAYLGARLASFYERAGRVKCLGNPEREGSVSIVGAVSPPGGDFSDPVTSATLGIVQVFWGLDKKLAQRKHFPSVNWLISYSKYMRALDEYYDKHFTEFVPLRTKAKEILQEEEDLAEIVQLVGKASLAETDKITLEVAKLIKDDFLQQNGYTPYDRFCPFYKTVGMLSNMIAFYDMARRAVETTAQSDNKITWSIIREHMGDILYKLSSMKFKDPLKDGEAKIKSDYAQLLEDMQNAFRSLED

SEQ ID NO: 68 - protein, 826 aa, Homo sapiens
  ref <308>: DATABASE ACCESSION NUMBER: sw_hum/vil1_human
  ref <309>: DATABASE ENTRY DATE: 1989-03-01
TKLSAQVKGSLNITTPGLQIWRIEAMQMVPVPSSTFGSFFDGDCYIILAIHKTASSLSYDIHYWIGQDSSLDEQGAAAIYTTQMDDFLKGRAVQHREVQGNESEAFRGYFKQGLVIRKGGVASGMKHVETNSYDVQRLLHVKGKRNVVAGEVEMSWKSFNRGDVFLLDLGKLIIQWNGPESTRMERLRGMTLAKEIRDQERGGRTYVGVVDGENELASPKLMEVMNHVLGKRRELKAAVPDTVVEPALKAALKLYHVSDSEGNLVVREVATRPLTQDLLSHEDCYILDQGGLKIYVWKGKKANEQEKKGAMSHALNFIKAKQYPPSTQVEVQNDGAESAVFQQLFQKWTASNRTSGLGKTHTVGSVAKVEQVKFDATSMHVKPQVAAQQKMVDDGSGEVQVWRIENLELVPVDSKWLGHFYGGDCYLLLYTYLIGEKQHYLLYVWQGSQASQDEITASAYQAVILDQKYNGEPVQIRVPMGKEPPHLMSIFKGRMVVYQGGTSRTNNLETGPSTRLFQVQGTGANNTKAFEVPARANFLNSNDVFVLKTQSCCYLWCGKGCSGDEREMAKMVADTISRTEKQVVVEGQEPANFWMALGGKAPYANTKRLQEENLVITPRLFECSNKTGRFLATEIPDFNQDDLEEDDVFLLDVWDQVFFWIGKHANEEEKKAAATTAQEYLKTHPSGRDPETPIIVVKQGHEPPTFTGWFLAWDPFKWSNTKSYEDLKAESGNLRDWSQITAEVTSPKVDVFNANSNLSSGPLPIFPLEQLVNKPVEELPEGVDPSRKEEHLSIEDFTQAFGMTPAAFSALPRWKQQNLKKEKGLF

SEQ ID NO: 69 - protein, 227 aa, Homo sapiens
  ref <308>: DATABASE ACCESSION NUMBER: tr_hum/q96hx0
  ref <309>: DATABASE ENTRY DATE: 2001-12-01
TPTYGDLNHLVSATMSGVTTCLRFPGQLNADLRKLAVNMVPFPRLHFFMPGFAPLTSRGSQQYRALTVPELTQQMFDAKNMMAACDPRHGRYLTVAAVFRGRMSMKEVDEQMLNVQNKNSSYFVEWIPNNVKTAVCDIPPRGLKMSATFIGNSTAIQELFKRISEQFTAMFRRKAFLHWYTGEGMDEMEFTEAESNMNDLVSEYQQYQDATAEEEGEFEEEAEEEVA

SEQ ID NO: 70 - protein, 531 aa, Homo sapiens
  ref <308>: DATABASE ACCESSION NUMBER: sw_hum/ptb_human
  ref <309>: DATABASE ENTRY DATE: 1992-08-01
MDGIVPDIAVGTKRGSDELFSTCVTNGPFIMSSNSASAANGNDSKKFKGDSRSAGVPSRVIHIRKLPIDVTEGEVISLGLPFGKVTNLLMLKGKNQAFIEMNTEEAANTMVNYYTSVTPVLRGQPIYIQFSNHKELKTDSSPNQARAQAALQAVNSVQSGNLALAASAAAVDAGMAMAGQSPVLRIIVENLFYPVTLDVLHQIFSKFGTVLKIITFTKNNQFQALLQYADPVSAQHAKLSLDGQNIYNACCTLRIDFSKLTSLNVKYNNDKSRDYTRPDLPSGDSQPSLDQTMAAAFGLSVPNVHGALAPLAIPSAAAAAAAAGRIAIPGLAGAGNSVLLVSNLNPERVTPQSLFILFGVYGDVQRVKILFNKKENALVQMADGNQAQLAMSHLNGHKLHGKPIRITLSKHQNVQLPREGQEDQGLTKDYGNSPLHRFKKPGSKNFQNIFPPSATLHLSNIPPSVSEEDLKVLFSSNGGVVKGFKFFQKDRKMALIQMGSVEEAVQALIDLHNHDLGENHHLRVSFSKSTI

SEQ ID NO: 71 - protein, 530 aa, Homo sapiens
  ref <308>: DATABASE ACCESSION NUMBER: sw_hum/kpy2_human
  ref <309>: DATABASE ENTRY DATE: 1990-04-01
SKPHSEAGTAFIQTQQLHAAMADTFLEHMCRLDIDSPPITARNTGIICTIGPASRSVETLKEMIKSGMNVARLNFSHGTHEYHAETIKNVRTATESFASDPILYRPVAVALDTKGPEIRTGLIKGSGTAEVELKKGATLKITLDNAYMEKCDENILWLDYKNICKVVEVGSKIYVDDGLISLQVKQKGADFLVTEVENGGSLGSKKGVNLPGAAVDLPAVSEKDIQDLKFGVEQDVDMVFASFIRKASDVHEVRKVLGEKGKNIKIISKIENHEGVRRFDEILEASDGIMVARGDLGIEIPAEKVFLAQKMMIGRCNRAGKPVICATQMLESMIKKPRPTRAEGSDVANAVLDGADCIMLSGETAKGDYPLEAVRMQNLIAREAEAAIYHLQLFEELRRLAPITSDPTEATAVGAVEASFKCCSGAIIVLTKSGRSAHQVARYRPRAPIIAVTRNPQTARQAHLYRGIFPVLCKDPVQEAWAEDVDLRVNFAMNVGKARGFFKKGDVVIVLTGWRPGSGFTNTMRVVPVP

SEQ ID NO: 72 - protein, 432 aa, Homo sapiens
  ref <308>: DATABASE ACCESSION NUMBER: sw_hum/acdb_human
  ref <309>: DATABASE ENTRY DATE: 1995-11-01
MEGLAVRLLRGSRLLRRNFLTCLSSWKIPPHVSKSSQSEALLNITNNGIHFAPLQTFTDEEMMIKSSVKKFAQEQIAPLVSTMDENSKMEKSVIQGLFQQGLMGIEVDPEYGGTGASFLSTVLVIEELAKVDASVAVFCEIQNTLINTLIRKHGTEEQKATYLPQLTTEKVGSFCLSEAGAGSDSFALKTRADKEGDYYVLNGSKMWISSAEHAGLFLVMANVDPTIGYKGITSFLVDRDTPGLHIGKPENKLGLRASSTCPLTFENVKVPEANILGQIGHGYKYAIGSLNEGRIGIAAQMLGLAQGCFDYTIPYIKERIQFGKRLFDFQGLQHQVAHVATQLEAARLLTYNAARLLEAGKPFIKEASMAKYYASEIAGQTTSKCIEWMGGVGYTKDYPVEKYFRDAKIGTIYEGASNIQLNTIAKHIDAEY

SEQ ID NO: 73 - protein, 262 aa, Homo sapiens
  ref <308>: DATABASE ACCESSION NUMBER: sw_hum/rs4_human
  ref <309>: DATABASE ENTRY DATE: 1989-10-01
ARGPKKHLKRVAAPKHWMLDKLTGVFAPRPSTGPHKLRECLPLIIFLRNRLKYALTGDEVKKICMQRFIKIDGKVRTDITYPAGFMDVISIDKTGENFRLIYDTKGRFAVHRITPEEAKYKLCKVRKIFVGTKGIPHLVTHDARTIRYPDPLIKVNDTIQIDLETGKITDFIKFDTGNLCMVTGGANLGRIGVITNRERHPGSFDVVHVKDANGNSFATRLSNIFVIGKGNKPWISLPRGKGIRLTIAEERDKRLAAKQSSG

SEQ ID NO: 74 - protein, 303 aa, Homo sapiens
  ref <308>: DATABASE ACCESSION NUMBER: sw_hum/crkl_human
  ref <309>: DATABASE ENTRY DATE: 1995-11-01
MSSARFDSSDRSAWYMGPVSRQEAQTRLQGQRHGMFLVRDSSTCPGDYVLSVSENSRVSHYIINSLPNRRFKIGDQEFDHLPALLEFYKIHYLDTTTLIEPAPRYPSPPMGSVSAPNLPTAEDNLEYVRTLYDFPGNDAEDLPFKKGEILVIIEKPEEQWWSARNKDGRVGMIPVPYVEKLVRSSPHGKHGNRNSNSYGIPEPAHAYAQPQTTTPLPAVSGSPGAAITPLPSTQNGPVFAKAIQKRVPCAYDKTALALEVGDIVKVTRMNINGQWEGEVNGRKGLFPFTHVKIFDPQNPDENE

SEQ ID NO: 75 - protein, 614 aa, Homo sapiens
  ref <308>: DATABASE ACCESSION NUMBER: sw_hum/ddx5_human
  ref <309>: DATABASE ENTRY DATE: 1990-08-01
MSGYSSDRDRGRDRGFGAPRFGGSRAGPLSGKKFGNPGEKLVKKKWNLDELPKFEKNFYQEHPDLARRTAQEVETYRRSKEITVRGHNCPKPVLNFYEANFPANVMDVIARQNFTEPTAIQAQGWPVALSGLDMVGVAQTGSGKTLSYLLPAIVHINHQPFLERGDGPICLVLAPTRELAQQVQQVAAEYCRACRLKSTCIYGGAPKGPQIRDLERGVEICIATPGRLIDFLECGKTNLRRTTYLVLDEADRMLDMGFEPQIRKIVDQIRPDRQTLMWSATWPKEVRQLAEDFLKDYIHINIGALELSANHNILQIVDVCHDVEKDEKLIRLMEEIMSEKENKTIVFVETKRRCDELTRKMRRDGWPAMGIHGDKSQQERDWVLNEFKHGKAPILIATDVASRGLDVEDVKFVINYDYPNSSEDYIHRIGRTARSTKTGTAYTFFTPNNIKQVSDLISVLREANQAINPKLLQLVEDRGSGRSRGRGGMKDDRRDRYSAGKRGGFNTFRDRENYDRGYSSLLKRDFGAKTQNGVYSAANYTNGSFGSNFVSAGIQTSFRTGNPTGTYQNGYDSTQQYGSNVPNMHNGMNQQAYAYPATAAAPMIGYPMPTGYSQ

SEQ ID NO: 76 - protein, 261 aa, Homo sapiens
  ref <308>: DATABASE ACCESSION NUMBER: sw_hum/las1_human
  ref <309>: DATABASE ENTRY DATE: 1998-07-15
MNPNCARCGKIVYPTEKVNCLDKFWHKACFHCETCKMTLNMKNYKGYEKKPYCNAHYPKQSFTMVADTPENLRLKQQSELQSQVRYKEEFEKNKGKGFSVVADTPELQRIKKTQDQISNIKYHEEFEKSRMGPSGGEGMEPERRDSQDGSSYRRPLEQQQPHHIPTSAPVYQQPQQQPVAQSYGGYKEPAAPVSIQRSAPGGGGKRYRAVYDYSAADEDEVSFQDGDTIVNVQQIDDGWMYGTVERTGDTGMLPANYVEAI

SEQ ID NO: 77 - protein, 528 aa, Homo sapiens
  ref <308>: DATABASE ACCESSION NUMBER: sw_hum/syy_human
  ref <309>: DATABASE ENTRY DATE: 1996-10-01
MGDAPSPEEKLHLITRNLQEVLGEEKLKEILKERELKIYWGTATTGKPHVAYFVPMSKIADFLKAGCEVTILFADLHAYLDNMKAPWELLELRVSYYENVIKAMLESIGVPLEKLKFIKGTDYQLSKEYTLDVYRLSSVVTQHDSKKAGAEVVKQVEHPLLSGLLYPGLQALDEEYLKVDAQFGGIDQRKIFTFAEKYLPALGYSKRVHLMNPMVPGLTGSKMSSSEEESKIDLLDRKEDVKKKLKKAFCEPGNVENNGVLSFIKHVLFPLKSEFVILRDEKWGGNKTYTAYVDLEKDFAAEVVHPGDLKNSVEVALNKLLDPIREKFNTPALKKLASAAYPDPSKQKPMAKGPAKNSEPEEVIPSRLDIRVGKIITVEKHPDADSLYVEKIDVGEAEPRTVVSGLVQFVPKEELQDRLVVVLCNLKPQKMRGVESQGMLLCASIEGINRQVEPLDPPAGSAPGEHVFVKGYEKGQPDEELKPKKKVFEKLQADFKISEECIAQWKQTNFMTKLGSISCKSLKGGNIS

SEQ ID NO: 78 - protein, 418 aa, Homo sapiens
  ref <308>: DATABASE ACCESSION NUMBER: sw_hum/sep7_human
  ref <309>: DATABASE ENTRY DATE: 1997-11-01
MVAQQKNLEGYVGFANLPNQVYRKSVKRGFEFTLMVVGESGLGKSTLINSLFLTDLYSPEYPGPSHRIKKTVQVEQSKVLIKEGGVQLLLTIVDTPGFGDAVDNSNCWQPVIDYIDSKFEDYLNAESRVNRRQMPDNRVQCCLYFIAPSGHGLKPLDIEFMKRLHEKVNIIPLIAKADTLTPEECQQFKKQIMKEIQEHKIKIYEFPETDDEEENKLVKKIKDRLPLAVVGSNTIIEVNGKRVRGRQYPWGIAEVENGEHCDFTILRNMKIRTHMQDLKDVTNNVHYENYRSRKLAAVTYNGVDNNKNKGQLTKSPLAQMEEERREHVAKMKKMEMEMEQVFEMKVKEKVQKLKDSEAELQRRHEQMKKNLEAQHKELEEKRRQFEDEKANWEAQQRILEQQNSSRTLEKNKKKGKIF

SEQ ID NO: 79 - protein, 213 aa, Homo sapiens
  ref <308>: DATABASE ACCESSION NUMBER: sw_hum/atpo_human
  ref <309>: DATABASE ENTRY DATE: 1996-02-01
MAAPAVSGLSRQVRCFSTSVVRPFAKLVRPPVQVYGIEGRYATALYSAASKQNKLEQVEKELLRVAQILKEPKVAASVLNPYVKRSIKVKSLNDITAKERFSPLTTNLINLLAENGRLSNTQGVVSAFSTMMSVHRGEVPCTVTSASPLEEATLSELKTVLKSFLSQGQVLKLEAKTDPSILGGMIVRIGEKYVDMSVKTKIQKLGRAMREIV

SEQ ID NO: 80 - protein, 808 aa, Homo sapiens
  ref <308>: DATABASE ACCESSION NUMBER: sw_hum/mcm3_human
  ref <309>: DATABASE ENTRY DATE: 1992-05-01
MAGTVVLDDVELREAQRDYLDFLDDEEDQGIYQSKVRELISDNQYRLIVNVNDLRRKNEKRANRLLNNAFEELVAFQRALKDFVASIDATYAKQYEEFYVGLEGSFGSKHVSPRTLTSCFLSCVVCVEGIVTKCSLVRPKVVRSVHYCPATKKTIERRYSDLTTLVAFPSSSVYPTKDEENNPLETEYGLSVYKDHQTITIQEMPEKAPAGQLPRSVDVILDDDLVDKAKPGDRVQVVGTYRCLPGKKGGYTSGTFRTVLIACNVKQMSKDAQPSFSAEDIAKIKKFSKTRSKDIFDQLAKSLAPSIHGHDYVKKAILCLLLGGVERDLENGSHIRGDINILLIGDPSVAKSQLLRYVLCTAPRAIPTTGRGSSGVGLTAAVTTDQETGERRLEAGAMVLADRGVVCIDEFDKMSDMDRTAIHEVMEQGRVTIAKAGIHARLNARCSVLAAANPVYGRYDQYKTPMENIGLQDSLLSRFDLLFIMLDQMDPEQDREISDHVLRMHRYRAPGEQDGDAMPLGSAVDILATDDPNFSQEDQQDTQIYEKHDNLLHGTKKKKEKMVSAAFMKKYIHVAKIIKPVLTQESATYIAEEYSRLRSQDSMSSDTARTSPVTARTLETLIRLATAHAKARMSKTVDLQDAEEAVELVQYAYFKKVLEKEKKRKKRSEDESETEDEEEKSQEDQEQKRKRRKTRQPDAKDGDSYDPYDFSDTEEEMPQVHTPKTADSQETKESQKVELSESRLKAFKVALLDVFREAHAQSIGMNRLTESINRDSEEPFSSVEIQAALSKMQDDNQVMVSEGIIFLI

SEQ ID NO: 81 - protein, 165 aa, Homo sapiens [sequence omitted]

SEQ ID NO: 82 - protein, 918 aa, Homo sapiens
  MISC_FEATURE (614)..(614): Xaa is an undetermined amino acid residue
  MISC_FEATURE (648)..(648): Xaa is an undetermined amino acid residue
  ref <308>: DATABASE ACCESSION NUMBER: tr_hum/q9y280
  ref <309>: DATABASE ENTRY DATE: 1999-11-01
MASLSRALRVAAAHPRQSPTRGMGPCNLSSAAGPTAEKSVPYQRTLKEGQGTSVVAQGPSRPLPSTANVVVIGGGSLGCQTLYHLAKLGMSGAVLLERERLTSGTTWHTAGLLWQLRPSDVEVELLAHTRRVVSRELEEETGLHTGWIQNGGLFIASNRQRLDEYKRLMSLGKAYGVESHVLSPAETKTLYPLMNVDDLYGTLYVPHDGTMDPAGTCTTLARAASARGAQVIENCPVTGIRVWTDDFGVRRVAGVETQHGSIQTPCVVNCAGVWASAVGRMAGVKVPLVAMHHAYVVTERIEGIQNMPNVRDHDASVYLRLQGDALSVGGYEANPIFWEEVSDKFAFGLFDLDWEVFTQHIEGAINRVPVLEKTGIKSTVCGPESFTPDHKPLMGEAPELRGFFLGCGFNSAGMMLGGGCGQELAHWIIHGRPEKDMHGYDIRRFHHSLTDHPRWIRERSHESYAKNYSVVFPHDEPLAGRNMRRDPLHEELLGQGCVFQERHGWERPGWFHPRGPAPVLEYDYYGAYGSRAHEDYAYRRLLADEYTFAFPPHHDTIKKECLACRGAAAVFDMSYFGKFYLVGLDARKAADWLFSADVSRPPGSTVYTCMLNHXGGTESDLTVSRLAPSHQASPLAPAFEGDGYYLAXGGAVAQHNWSHITTVLQDQKSQCQLIDSSEDLGMISIQGPASRAILQEVLDADLSNEAFPFSTHKLLRAAGHLVRAMRLSFVGELGWELHIPKASCVPVYRAVMAAGAKHGLINAGYRAIDSLSIEKGYRHWHADLRPDDSPLEAGLAFTCKLKSPVPFLGREALEQQRAAGLRRRLVCFTMEDKVPMFGLEAIWRNGQVVGHVRRADFGFAIDKTIAYGYIHDPSGGPVSLDFVKSGDYALERMGVTYGAQAHLKSPFDPNNKRVKGIY

SEQ ID NO: 83 - protein, 357 aa, Homo sapiens
  ref <308>: DATABASE ACCESSION NUMBER: sw_hum/amrp_human
  ref <309>: DATABASE ENTRY DATE: 1993-04-01
MAPRRVRSFLRGLPALLLLLLFLGPWPAASHGGKYSREKNQPKPSPKRESGEEFRMEKLNQLWEKAQRLHLPPVRLAELHADLKIQERDELAWKKLKLDGLDEDGEKEARLIRNLNVILAKYGLDGKKDARQVTSNSLSGTQEDGLDDPRLEKLWHKAKTSGKFSGEELDKLWREFLHHKEKVHEYNVLLETLSRTEEIHENVISPSDLSDIKGSVLHSRHTELKEKLRSINQGLDRLRRVSHQGYSTEAEFEEPRVIDLWDLAQSANLTDKELEAFREELKHFEAKIEKHNHYQKQLEIAHEKLRHAESVGDGERVSRSREKHALLEGRTKELGYTVKKHLQDLSGRISRARHNEL

SEQ ID NO: 84 - protein, 354 aa, Homo sapiens
  ref <308>: DATABASE ACCESSION NUMBER: sw_hum/arg2_human
  ref <309>: DATABASE ENTRY DATE: 1997-11-01
MSLRGSLSRLLQTRVHSILKKSVHSVAVIGAPFSQGQKRKGVEHGPAAIREAGLMKRLSSLGCHLKDFGDLSFTPVPKDDLYNNLIVNPRSVGLANQELAEVVSRAVSDGYSCVTLGGDHSLAIGTISGHARHCPDLCVVWVDAHADINTPLTTSSGNLHGQPVSFLLRELQDKVPQLPGFSWIKPCISSASIVYIGLRDVDPPEHFILKNYDIQYFSMRDIDRLGIQKVMERTFDLLIGKRQRPIHLSFDIDAFDPTLAPATGTPVVGGLTYREGMYIAEEIHNTGLLSALDLVEVNPQLATSEEEAKTTANLAVDVIASSFGQTREGGHIVYDQLPTPSSPDESENQARVRI

SEQ ID NO: 85 - protein, 333 aa, Homo sapiens
  ref <308>: DATABASE ACCESSION NUMBER: sw_hum/if2b_human
  ref <309>: DATABASE ENTRY DATE: 1991-02-01
MSGDEMIFDPTMSKKKKKKKKPFMLDEEGDTQTEETQPSETKEVEPEPTEDKDLEADEEDTRKKDASDDLDDLNFFNQKKKKKKTKKIFDIDEAEEGVKDLKIESDVQEPTEPEDDLDIMLGNKKKKKKNVKFPDEDEILEKDEALEDEDNKKDDGISFSNQTGPAWAGSERDYTYEELLNRVFNIMREKNPDMVAGEKRKFVMKPPQVVRVGTKKTSFVNFTDICKLLHRQPKHLLAFLLAELGTSGSIDGNNQLVIKGRFQQKQIENVLRRYIKEYVTCHTCRSPDTILQKDTRLYFLQCETCHSRCSVASIKTGFQAVTGKRAQLRAKAN

SEQ ID NO: 86 - protein, 391 aa, Homo sapiens
  ref <308>: DATABASE ACCESSION NUMBER: sw_hum/rog_human
  ref <309>: DATABASE ENTRY DATE: 1994-10-01
MVEADRPGKLFIGGLNTETNEKALEAVFGKYGRIVEVLLMKDRETNKSRGFAFVTFESPADAKDAARDMNGKSLDGKAIKVEQATKPSFESGRRGPPPPPRSRGPPRGLRGGRGGSGGTRGPPSRGGHMDDGGYSMNFNMSSSRGPLPVKRGPPPRSGGPPPKRSAPSGPVRSSSGMGGRAPVSRGRDSYGGPPRREPLPSRRDVYLSPRDDGYSTKDSYSSRDYPSSRDTRDYAPPPRDYTYRDYGHSSSRDDYPSRGYSDRDGYGRDRDYSDHPSGGSYRDSYESYGNSRSAPPTRGPPPSYGGSSRYDDYSSSRDGYGGSRDSYSSSRSDLYSSGRDRVGRQERGLPPSMERGYPPPRDSYSSSSRGAPRGGGRGGSRSDRGGGRSRY

SEQ ID NO: 87 - protein, 669 aa, Homo sapiens
  ref <308>: DATABASE ACCESSION NUMBER: humangp/chr11-075932
  ref <309>: DATABASE ENTRY DATE: 2003-04-22
MKIFVGNVDGADTTPEELAALFAPYGTVMSCAVMKQFAFVHMRENAGALRAIEALHGHELRPGRALVVEMSRPRPLNTWKIFVGNVSAACTSQELRSLFERRGRVIECDVVKDYAFVHMEKEADAKAAIAQLNGKEVKGKRINVELSTKGQKKGPGLAVQSGDKTKKPGAGDTAFPGTGGFSATFDYQQAFGNSTGGFDGQARQPTPPFFGRDRSPLRRSPPRASYVAPLTAQPATYRAQPSVSLGAAYRAQPSASLGVGYRTQPMTAQAASYRAQPSVSLGAPYRGQLASPSSQSAAASSLGPYGGAQPSASALSSYGGQAAAASSLNSYGAQGSSLASYGNQPSSYGAQAASSYGVRAAASSYNTQGAASSLGSYGAQAASYGAQSAASSLAYGAQAASYNAQPSASYNAQSAPYAAQQAASYSSQPAAYVAQPATAAAYASQPAAYAAQATTPMAGSYGAQPVVQTQLNSYGAQASMGLSGSYGAQSAAAATGSYGAAAAYGAQPSATLAAPYRTQSSASLAASYAAQQHPQAAASYRGQPGNAYDGAGQPSAAYLSMSQGAVANANSTPPPYERTRLSPPRASYDDPYKKAVAMSKRYGSDRRLAELSDYRRLSESQLSFRRSPTKSSLDYRRLPDAHSDYARYSGSYNDYLRAAQMHSGYQRRM

SEQ ID NO: 88 - protein, 539 aa, Homo sapiens
  ref <308>: DATABASE ACCESSION NUMBER: sw_hum/tcpd_human
  ref <309>: DATABASE ENTRY DATE: 1996-10-01
MPENVAPRSGATAGAAGGRGKGAYQDRDKPAQIRFSNISAAKAVADAIRTSLGPKGMDKMIQDGKGDVTITNDGATILKQMQVLHPAARMLVELSKAQDIEAGDGTTSVVIIAGSLLDSCTKLLQKGIHPTIISESFQKALEKGIEILTDMSRPVELSDRETLLNSATTSLNSKVVSQYSSLLSPMSVNAVMKVIDPATATSVDLRDIKIVKKLGGTIDDCELVEGLVLTQKVSNSGITRVEKAKIGLIQFCLSAPKTDMDNQIVVSDYAQMDRVLREERAYILNLVKQIKKTGCNVLLIQKSILRDALSDLALHFLNKMKIMVIKDIEREDIEFICKTIGTKPVAHIDQFTADMLGSAELAEEVNLNGSGKLLKITGCASPGKTVTIVVRGSNKLVIEEAERSIHDALCVIRCLVKKRALIAGGGAPEIELALALTEYSRTLSGMESYCVRAFADAMEVIPSTLAENAGLNPISTVTELRNRHAQGEKTAGINVRKGGISNILEELVVQPLLVSVSALTLATETVRSILKIDDVVNTR

SEQ ID NO: 89 - protein, 306 aa, Homo sapiens
  MISC_FEATURE (30)..(30): Xaa is an undetermined amino acid residue
  MISC_FEATURE (114)..(114): Xaa is an undetermined amino acid residue
  MISC_FEATURE (117)..(117): Xaa is an undetermined amino acid residue
  MISC_FEATURE (126)..(126): Xaa is an undetermined amino acid residue
  MISC_FEATURE (131)..(131): Xaa is an undetermined amino acid residue
  MISC_FEATURE (132)..(132): Xaa is an undetermined amino acid residue
  MISC_FEATURE (139)..(139): Xaa is an undetermined amino acid residue
  MISC_FEATURE (141)..(141): Xaa is an undetermined amino acid residue
  MISC_FEATURE (152)..(152): Xaa is an undetermined amino acid residue
  MISC_FEATURE (157)..(157): Xaa is an undetermined amino acid residue
  MISC_FEATURE (172)..(172): Xaa is an undetermined amino acid residue
  MISC_FEATURE (174)..(174): Xaa is an undetermined amino acid residue
  MISC_FEATURE (175)..(175): Xaa is an undetermined amino acid residue
  MISC_FEATURE (176)..(176): Xaa is an undetermined amino acid residue
  MISC_FEATURE (177)..(177): Xaa is an undetermined amino acid residue
  MISC_FEATURE (179)..(179): Xaa is an undetermined amino acid residue
  MISC_FEATURE (189)..(189): Xaa is an undetermined amino acid residue
  MISC_FEATURE (193)..(193): Xaa is an undetermined amino acid residue
  MISC_FEATURE (198)..(198): Xaa is an undetermined amino acid residue
  MISC_FEATURE (199)..(199): Xaa is an undetermined amino acid residue
  MISC_FEATURE (201)..(201): Xaa is an undetermined amino acid residue
  MISC_FEATURE (202)..(202): Xaa is an undetermined amino acid residue
  MISC_FEATURE (204)..(204): Xaa is an undetermined amino acid residue
  MISC_FEATURE (206)..(206): Xaa is an undetermined amino acid residue
  MISC_FEATURE (209)..(209): Xaa is an undetermined amino acid residue
  MISC_FEATURE (211)..(211): Xaa is an undetermined amino acid residue
  MISC_FEATURE (214)..(214): Xaa is an undetermined amino acid residue
  MISC_FEATURE (217)..(217): Xaa is an undetermined amino acid residue
  MISC_FEATURE (234)..(234): Xaa is an undetermined amino acid residue
  ref <308>: DATABASE ACCESSION NUMBER: hsugp/075546-8-0
  ref <309>: DATABASE ENTRY DATE: 2003-02-16
RWPLPPPPPGCRQKEDADLEEQLSDEEKVXYRAKFIIHAPPGEFNEVFNDVRLLLNNDNLLREGAAHAFAQYNLDQFTPVKIEGYEDQVLITNMGDLGNGKVFGIQRTESVLNXDHXKEGGQLIQXPCEVXXMQLNHGXTXSRNCSESLRKXNITRXGVCTVYGKKIDGQQXIXXXXIXKPSVPSKKFXNGRXRSEWXXTXXPXNXSSXWXLEXPVXYYDDGYVQLVSHNGFQXSLTVSNGVHQPKNYKVVTVRMNSMLGEFRHVAYSSLVKGRPQRWEDFNGSALKRRSSTNKGRGTKRTPLPDF

SEQ ID NO: 90 - protein, 531 aa, Homo sapiens
  ref <308>: DATABASE ACCESSION NUMBER: humangp/chr3-075191
  ref <309>: DATABASE ENTRY DATE: 2003-04-22
MAEHAPRRCCLGWDFSTQQVKVVAVDAELNVFYEESVHFDRDLPEFGYVLDVHVTQGGVHVHKDGLTVTSPVLMWVQALDIILEKMKASGFDFSQVLALSGAGQQHGSIYWKAGAQQALTSLSPDLRLHQQLQDCFSISDCPVWMDSSTTAQCRQLEAAVGGAQALSCLTGSRAYERFTGNQIAKIYQQNPEAYSHTERISLVSSFAASLFLGSYSPIDYSDGSGMNLLQIQDKVWSQACLGACAPHLEEKLSPPVPSCSVVGAISSYYVQRYGFPPGCKVVAFTGDNPASLAGMRLEEGDIAVSLGTSDTLFLWLQEPMPALEGHIFCNPVDSQHYMALLCFKNGSLMREKIRNESVSRSWSDFSKALQSTEMGNGGNLGFYFDVMEITPEIIGRHRFNTENHKVAAFPGDVEVRALIEGQFMAKRIHAEGLGYRVMSKTKILATGGASHNREILQVLADVFDAPVYVIDTANSACVGSAYRAFHGLAGGTDVPFSEVVKLAPNPRLAATPSPGASQVRDHRNLFVAFAL

SEQ ID NO: 91 - protein, 384 aa, Homo sapiens
  ref <308>: DATABASE ACCESSION NUMBER: sw_hum/dus9_human
  ref <309>: DATABASE ENTRY DATE: 1998-12-15
MEGLGRSCLWLRRELSPPRPRLLLLDCRSRELYESARIGGALSVALPALLLRRLRRGSLSVRALLPGPPLQPPPPAPVLLYDQGGGRRRRGEAEAEAEEWEAESVLGTLLQKLREEGYLAYYLQGGFSRFQAECPHLCETSLAGRAGSSMAPVPGPVPVVGLGSLCLGSDCSDAESEADRDSMSCGLDSEGATPPPVGLRASFPVQILPNLYLGSARDSANLESLAKLGIRYILNVTPNLPNFFEKNGDFHYKQIPISDHWSQNLSRFFPEAIEFIDEALSQNCGVLVHCLAGVSRSVTVTVAYLMQKLHLSLNDAYDLVKRKKSNISPNFNFMGQLLDFERSLRLEERHSQEQGSGGQASAASNPPSFFTTPTSDGAFELAPT

SEQ ID NO: 92 - protein, 218 aa, Homo sapiens
  ref <308>: DATABASE ACCESSION NUMBER: sw_hum/gtm4_human
  ref <309>: DATABASE ENTRY DATE: 1995-11-01
MSMTLGYWDIRGLAHAIRLLLEYTDSSYEEKKYTMGDAPDYDRSQWLNEKFKLGLDFPNLPYLIDGAHKITQSNAILCYIARKHNLCGETEEEKIRVDILENQAMDVSNQLARVCYSPDFEKLKPEYLEELPTMMQHFSQFLGKRPWFVGDKITFVDFLAYDVLDLHRIFEPNCLDAFPNLKDFISRFEGLEKISAYMKSSRFLPKPLYTRVAVWGNK

SEQ ID NO: 93 - protein, 207 aa, Homo sapiens
  ref <308>: DATABASE ACCESSION NUMBER: sw_hum/rs8_humam
  ref <309>: DATABASE ENTRY DATE: 1988-11-01
GISRDNWHKRRKTGGKRKPYHKKRKYELGRPAANTKIGPRRIHTVRVRGGNKKYRALRLDVGNFSWGSECCTRKTRIIDVVYNASNNELVRTKTLVKNCIVLIDSTPYRQWYESHYALPLGRKKGAKLTPEEEEILNKKRSKKIQKKYDERKKNAKISSLLEEQFQQGKLLACIASRPGQCGRADGYVLEGKELEFYLRKIKARKGK

SEQ ID NO: 94 - protein, 299 aa, Homo sapiens
  ref <308>: DATABASE ACCESSION NUMBER: sw_hum/sm30_human
  ref <309>: DATABASE ENTRY DATE: 1998-07-15
MSSIKIECVLPENCRCGESPVWEEVSNSLLFVDIPAKKVCRWDSFTKQVQRVTMDAPVSSVALRQSGGYVATIGTKFCALNWKEQSAVVLATVDNDKKNNRFNDGKVDPAGRYFAGTMAEETAPAVLERHQGALYSLFPDHHVKKYFDQVDISNGLDWSLDHKIFYYIDSLSYSVDAFDYDLQTGQISNRRSVYKLEKEEQIPDGMCIDAEGKLWVACYNGGRVIRLDPVTGKRLQTVKLPVDKTTSCCFGGKNYSEMYVTCARDGMDPEGLLRQPEAGGIFKITGLGVKGIAPYSYAG

SEQ ID NO: 95 - protein, 253 aa, Homo sapiens
  MISC_FEATURE (76)..(76): Xaa is an undetermined amino acid residue
  MISC_FEATURE (114)..(114): Xaa is an undetermined amino acid residue
  ref <308>: DATABASE ACCESSION NUMBER: hsugp/013561-2-0
  ref <309>: DATABASE ENTRY DATE: 2003-02-16
CVVDNPYYPPFEWSLKPVRPQPERPEPSEFRERGKRKEPPIRQPASPRGVAGLINADGHDRFPDWKPASERNAINXELAHSLGTPGFTLYASGSYVVWNCERITISTGNSYDMXYEFNTTHYREFGPRDQEFGTRGTNMDNRLPLENGRFIAGTGCLVRAVEMAAQRQADIIGKPSRFIFDCVSQEYGINPERTVMVGDRLDTDILLGATCGLKTILTLTGVSTLGDVKNNQESDCVSKKKMVPDFYVDSIAD

SEQ ID NO: 96 - protein, 236 aa, Homo sapiens
  ref <308>: DATABASE ACCESSION NUMBER: humangp/chr2-q9uqe6
  ref <309>: DATABASE ENTRY DATE: 2003-01-07
MAAERGAGQQQSQEMMEEEHELPVDMETINLDRDAEDVDLNHYRIGKIEGFEVLKKVKTLCLRQNLIKCIENLEELQSLRELDLYDNQIKKIENLEALTELEILDISFNLLRNIEGVDKLTRLKKLFLVNNKISKIENLSNLHQLQMLELGSNRIRAIENIDTLTNLESLFLGKNKITKLQNLDALTNLTVLSMQSNRLTKIEGLQNLVNLRELYLSHNGIEVIEGLENNVRHPLS

SEQ ID NO: 97 - protein, 718 aa, Homo sapiens
  ref <308>: DATABASE ACCESSION NUMBER: humangp/chr7-q9unh0
  ref <309>: DATABASE ENTRY DATE: 2003-01-07
MEDLGENTMVLSTLRSLNNFISQRVEGGSGLDISTSAPGSLQMQYQQSMQLEERAEQIRSKSHLIQVEREKMQMELSHKRARVELERAASTSARNYEREVDRNQELLTRIRQLQEREAGAEEKMQEQLERNRQCQQNLDAASKRLREKEDSLAQAGETINALKGRISELQWSVMDQEMRVKRLESEKQELQEQLDLQHKKCQEANQKIQELQASQEARADHEQQIKDLEQKLSLQEQDAAIVKNMKSELVRLPRLERELKQLREESAHLREMRETNGLLQEELEGLQRKLGRQEKMQETLVGLELENERLLAKLQSWERLDQTMGLSIRTPEDLSRFVVELQQRELALKDKNSAVTSSARGLEKARQQLQEELRQVSGQLLEERKKRETHEALARRLQKRVLLLTKERDGMRAILGSYDSELTPAEYSPQLTRRMREAEDMVQKVHSHSAEMEAQLSQALEELGGQKQRADMLEMELKMLKSQSSSAEQSFLFSREEADTLRLKVEELEGERSRLEEEKRMLEAQLERRALQGDYDQSRTKVLHMSLNPTSVARQRLREDHSQLQAECERLRGLLRAMERGGTVPADLEAAAASLPSSKEVAELKKQVESAELKNQRLKEVFQTKIQEFRKACYTLTGYQIDITTENQYRLTSLYAEHPGDCLIFKATSPSGSKMQLLETEFSHTVGELIEVHLRRQDSIPAFLSSLTLELFSRQTVA

SEQ ID NO: 98 - protein, 182 aa, Homo sapiens
  ref <308>: DATABASE ACCESSION NUMBER: sw_hum/pebb_human
  ref <309>: DATABASE ENTRY DATE: 1997-11-01
MPRVVPDQRSKFENEEFFRKLSRECEIKYTGFRDRPHEERQARFQNACRDGRSEIAFVATGTNLSLQFFPASWQGEQRQTPSREYVDLEREAGKVYLKAPMILNGVCVIWKGWIDLQRLDGMGCLEFDEERAQQEDALAQQAFEEARRRTREFEDRDRSHREEMEVRVSQLLAVTGKKTTRP

SEQ ID NO: 99 - protein, 737 aa, Homo sapiens
  MISC_FEATURE (98)..(98): Xaa is an undetermined amino acid residue
  MISC_FEATURE (242)..(242): Xaa is an undetermined amino acid residue
  MISC_FEATURE (259)..(259): Xaa is an undetermined amino acid residue
  MISC_FEATURE (262)..(262): Xaa is an undetermined amino acid residue
  MISC_FEATURE (263)..(263): Xaa is an undetermined amino acid residue
  MISC_FEATURE (264)..(264): Xaa is an undetermined amino acid residue
  MISC_FEATURE (269)..(269): Xaa is an undetermined amino acid residue
  MISC_FEATURE (282)..(282): Xaa is an undetermined amino acid residue
  MISC_FEATURE (283)..(283): Xaa is an undetermined amino acid residue
  MISC_FEATURE (284)..(284): Xaa is an undetermined amino acid residue
  MISC_FEATURE (337)..(337): Xaa is an undetermined amino acid residue
  MISC_FEATURE (368)..(368): Xaa is an undetermined amino acid residue
  MISC_FEATURE (418)..(418): Xaa is an undetermined amino acid residue
  MISC_FEATURE (419)..(419): Xaa is an undetermined amino acid residue
  MISC_FEATURE (425)..(425): Xaa is an undetermined amino acid residue
  MISC_FEATURE (428)..(428): Xaa is an undeteremined amino acid residue
  MISC_FEATURE (429)..(429): Xaa is an undetermined amino acid residue
  MISC_FEATURE (430)..(430): Xaa is an undetermined amino acid residue
  MISC_FEATURE (432)..(432): Xaa is an undetermined amino acid residue
  MISC_FEATURE (439)..(439): Xaa is an undetermined amino acid residue
  MISC_FEATURE (443)..(443): Xaa is an undetermined amino acid residue
  MISC_FEATURE (499)..(499): Xaa is an undetermined amino acid residue
  MISC_FEATURE (500)..(500): Xaa is an undetermined amino acid residue
  MISC_FEATURE (502)..(502): Xaa is an undetermined amino acid residue
  MISC_FEATURE (506)..(506): Xaa is an undetermined amino acid residue
  MISC_FEATURE (507)..(507): Xaa is an undetermined amino acid residue
  MISC_FEATURE (511)..(511): Xaa is an undetermined amino acid residue
  MISC_FEATURE (513)..(513): Xaa is an undetermined amino acid residue
  ref <308>: DATABASE ACCESSION NUMBER: hsugp/075309-23-0
  ref <309>: DATABASE ENTRY DATE: 2003-02-16
LVQLEVLMVTPHRTSCLLEIIYPRVPFPFLGQKPLRAMYPNKPLNAFVKISLDIEFPSEEMEKVLGVPSRLPLPDRPIKSLLRGRVCCLLFLEIHDRXKHLEDGVQDQLAEGAGSFFPSGLVADLLNLPLAGSKYLSPHSFFIMSSTFLARSAGPKAPDLAGLSHVPLVLLGQVARPLLELLTGGHLAFIDVLGQASGDQPREDSSKGVEPTFVGGWHHFGNIHHKRAFGVTAFNAHGSLVXSGGPFDTGARSRYFWAXETXXXERRCXRDSLQVRLRIRGXXXEDVLLWVLRVPGAAGAAGRAAYNLSRKLSRAGMPSFRPLRLRVSATTWLGRLXVVEGVSGQDLPVVKHTLGERLAARVGPQVSXDPKGPLMMYISKMVPTSDKGRFYAFERVFSGLVSTGLKVRIMGPNYTPGXXEDLYLXANXXXTXLDDGPLXGAHXGCALGAITFVASVSVDHVPGEDGSITTFEKARKMRVMKFRVNPVVRRGRETAKNPXXTXPKLXXGAEXGXAKSDPMVQCIIEESGEHIIAGAGELHLEICLKDLEEDHACIPIKKSDPVVSYRETVSEESNVLCLSKSPNKHNRLYMKARPFPDGLAEDIDKGEVSARQELKQRARYLAEKYEWDVAEARKIWCFGPDGTEHQTIHSPTYTKGCSKYLNEIKAQKWIGQAYQWGNHRRAHCCEREHCVGVRYEYHESKPLQAEAIHTEGAKIITRGGSCLYASVLDAQPRLMDP

SEQ ID NO: 100 - protein, 268 aa, Homo sapiens
  MISC_FEATURE (209)..(209): Xaa is an undetermined amino acid residue
  MISC_FEATURE (221)..(221): Xaa is an undetermined amino acid residue
  MISC_FEATURE (233)..(233): Xaa is an undetermined amino acid residue
  MISC_FEATURE (240)..(240): Xaa is an undetermined amino acid residue
  MISC_FEATURE (243)..(243): Xaa is an undetermined amino acid residue
  MISC_FEATURE (244)..(244): Xaa is an undetermined amino acid residue
  MISC_FEATURE (245)..(245): Xaa is an undetermined amino acid residue
  MISC_FEATURE (246)..(246): Xaa is an undetermined amino acid residue
  MISC_FEATURE (247)..(247): Xaa is an undetermined amino acid residue
  MISC_FEATURE (268)..(268): Xaa is an undetermiend amino acid residue
  ref <308>: DATABASE ACCESSION NUMBER: hsugp/075309-24-0
  ref <309>: DATABASE ENTRY DATE: 2003-02-16
KKSSAVVAAILGATRFFRFYLGESTAIRHLVNFTVDQIRAIMDKKANIRNMSVIAHVDHGKSTLTDSLVCKAGIIASARAGETRFTDTRKDEQERCITIKSTAISLFYELSENDLNFIKQSKDGAGFLINLIDSPGHVDFSSEVTAALRVTDGALVVVDCVSGVCVQTETVLRQAIAERIKPVLMMNKMDRALLELQLEPEELNRLSSXIVENVNVIISTXRRGAKSRPPWGXHHESILXLRXXXXXWDFGPPTGWGPCHPRKAVFPX

SEQ ID NO: 101 - protein, 470 aa, Homo sapiens
  ref <308>: DATABASE ACCESSION NUMBER: sw_hum/nr54_human
  ref <309>: DATABASE ENTRY DATE: 1993-07-01
QSNKTFNLEKQNHTPRKHHQHHHQQQHHQQQQQQPPPPPIPANGQQASSQNEGLTIDLKNFRKPGEKTFTQRSRLFVGNLPPDITEEEMRKLFEKYGKAGEVFIHKDKGFGFIRLETRTLAEIAKVELDNMPLRGKQLRVRFACHSASLTVRNLPQYVSNELLEEAFSVFGQVERAVVIVDDRGRPSGKGIVEFSGKPAARKALDRCSEGSFLLTTFPRPVTVEPMDQLDDEEGLPEKLVIKNQQFHKEREQPPRFAQPGSFEYEYAMRWKALIEMEKQQQDQVDRNIKEAREKLEMEMEAARHEHQVMLMRQDLMRRQEELRRMEELHNQEVQKRKQLELRQEEERRRREEEMRRQQEEMMRRQQEGFKGTFPDAREQEIRMGQMAMGGAMGINNRGAMPPAPVPAGTPAPPGPATMMPDGTLGLTPPTTERFGQAATMEGIGAIGGTPPAFNRAAPGAEFAPNKRRRY

SEQ ID NO: 102 - protein, 660 aa, Homo sapiens [sequence omitted]

SEQ ID NO: 103 - protein, 339 aa, Homo sapiens
  ref <308>: DATABASE ACCESSION NUMBER: humangp/chr8-094905
  ref <309>: DATABASE ENTRY DATE: 2003-04-22
MAQLGAVVAVASSFFCASLFSAVHKIEEGHIGVYYRGGALLTSTSGPGFHLMLPFITSYKSVQTTLQTDEVKNVPCGTSGGVMIYFDRIEVVNFLVPNAVYDIVKNYTADYDKALIFNKIHHELNQFCSVHTLQEVYIELFDQIDENLKLALQQDLTSMAPGLVIQAVRVTKPNIPEAIRRNYELMESEKTKLLIAAQKQKVVEKEAETERKKALIEAEKVAQVAEITYGQKVMEKETEKKISEIEDAAFLAREKAKADAECYTAMKIAEANKLKLTPEYLQLMKYKAIASNSKIYFGKDIPNMFMDSAGSVSKQFEGLADKLSFGLEDEPLETATKEN

SEQ ID NO: 104 - protein, 511 aa, Homo sapiens
  ref <308>: DATABASE ACCESSION NUMBER: sw_hum/copd_human
  ref <309>: DATABASE ENTRY DATE: 1996-02-01
MVLLAAAVCTKAGKAIVSRQFVEMTRTRIEGLLAAFPKLMNTGKQHTFVETESVRYVYQPMEKLYMVLITTKNSNILEDLETLRLFSRVIPEYCRALEENEISEHCFDLIFAFDEIVALGYRENVNLAQIRTFTEMDSHEEKVFRAVRETQEREAKAEMRRKAKELQQARRDAERQGKKAPGFGGFGSSAVSGGSTAAMITETIIETDKPKVAPAPARPSGPSKALKLGAKGKEVDNFVDKLKSEGETIMSSSMGKRTSEATKMHAPPINMESVHMKIEEKITLTCGRDGGLQNMELHGMIMLRISDDKYGRIRLHVENEDKKGVQLQTHPNVDKKLFTAESLIGLKNPEKSFPVNSDVGVLKWRLQTTEESFIPLTINCWPSESGNGCDVNIEYELQEDNLELNDVVITIPLPSGVGAPVIGEIDGEYRHDSRRNTLEWCLPVIDAKNKSGSLEFSIAGQPNDFFPVQVSFVSKKNYCNIQVTKVTQVDGNSPVRFSTETTFLVDKYEIL

SEQ ID NO: 105 - protein, 277 aa, Homo sapiens
  ref <308>: DATABASE ACCESSION NUMBER: sw_jum/capb_human
  ref <309>: DATABASE ENTRY DATE: 1996-02-01
MSDQQLDCALDLMRRLPPQQIEKNLSDLIDLVPSLCEDLLSSVDQPLKIARDKVVGKDYLLCDYNRDGDSYRSPWSNKYDPPLEDGAMPSARLRKLEVEANNAFDQYRDLYFEGGVSSVYLWDLDHGFAGVILIKKAGDGSKKIKGCWDSIHVVEVQEKSSGRTAHYKLTSTVMLWLQTNKSGSGTMNLGGSLTRQMEKDETVSDCSPHIANIGRLVEDMENKIRSTLNEIYFGKTKDIVNGLRSIDAIPDNQKFKQLQRELSQVLTQRQIYIQPDN

SEQ ID NO: 106 - protein, 226 aa, Homo sapiens
  ref <308>: DATABASE ACCESSION NUMBER: sw_hum/vate_human
  ref <309>: DATABASE ENTRY DATE: 1994-06-01
MALSDADVQKQIKHMMAFIEQEANEKAEEIDAKAEEEFNIEKGRLVQTQRLKIMEYYEKKEKQIEQQKKIQMSNLMNQARLKVLRARDDLITDLLNEAKQRLSKVVKDTTRYQVLLDGLVLQGLYQLLEPRMIVRCRKQDFPLVKAAVQKAIPMYKIATKNDVDVQIDQESYLPEDIAGGVEIYNGDRKIKVSNTLESRLDLIAQQMMPEVRGALFGANANRKFLD

SEQ ID NO: 107 - protein, 1101 aa, Homo sapiens [sequence omitted]

SEQ ID NO: 108 - protein, 197 aa, Homo sapiens
  MISC_FEATURE (21)..(21): Xaa is an undetermined amino acid residue
  MISC_FEATURE (75)..(75): Xaa is an undetermined amino acid residue
  MISC_FEATURE (91)..(91): Xaa is an undetermined amino acid residue
  MISC_FEATURE (104)..(104): Xaa is an undetermined amino acid residue
  MISC_FEATURE (106)..(106): Xaa is an undetermined amino acid residue
  MISC_FEATURE (117)..(117): Xaa is an undetermined amino acid residue
  MISC_FEATURE (133)..(133): Xaa is an undetermined amino acid residue
  MISC_FEATURE (152)..(152): Xaa is an undetermined amino acid residue
  ref <308>: DATABASE ACCESSION NUMBER: hsugp/008768-9-0
  ref <309>: DATABASE ENTRY DATE: 2002-12-05
VSGILTIVLPVKTDSIDIKLXLYDDSKESFKSQENVKGGLNLPLVSAAATGVSQEVTNSRAESDPLAHDIKTLFXKKPFMNGFRFGLRVAXGVNWIGIWIHFTXKXFIILNFEETSXPLAALPNVSFWEREFXVTGLRSLTTQNRKIILTIXDFRMLSIKSHENCLQRVLKRHQPVFFETPSVGVEDATGDNRFLQA

SEQ ID NO: 109 - protein, 56 aa, Homo sapiens
  ref <308>: DATABASE ACCESSION NUMBER: hsugp/075546-6-0
  ref <309>: DATABASE ENTRY DATE: 2003-02-16
LLEAAENEYQTAISENYQTMSDTTFKALRRQLPVTRTKIDWNKILSYKIGKEMQNA

SEQ ID NO: 110 - protein, 650 aa, Homo sapiens
  ref <308>: DATABASE ACCESSION NUMBER: sw_hum/dd17_human
  ref <309>: DATABASE ENTRY DATE: 1998-07-15
MRGGGFGDRDRDRDRGGFGARGGGGLPPKKFGNPGERLRKKKWDLSELPKFEKNFYVEHPEVARLTPYEVDELRRKKEITVRGGDVCPKPVFAFHHANFPQYVMDVLMDQHFTEPTPIQCQGFPLALSGRDMVGIAQTGSGKTLAYLLPAIVHINHQPYLERGDGPICLVLAPTRELAQQVQQVADDYGKCSRLKSTCIYGGAPKGPQIRDLERGVEICIATPGRLIDFLESGKTNLRRCTYLVLDEADRMLDMGFEPQIRKIVDQIRPDRQTLMWSATWPKEVRQLAEDFLRDYTQINVGNLELSANHNILQIVDVCMESEKDHKLIQLMEEIMAEKENKTIIFVETKRRCDDLTRRMRRDGWPAMCIHGDKSQPERDWVLNEFRSGKAPILIATDVASRGLDVEDVKFVINYDYPNSSEDYVHRIGRTARSTNKGTAYTFFTPGNLKQARELIKVLEEANQAINPKLMQLVDHRGGGGGGGGRSRYRTTSSANNPNLMYQDECDRRLRGVKDGGRRDSASYRDRSETDRAGYANGSGYGSPNSAFGAQAGQYTYGQGTYGAAAYGTSSYTAQEYGAGTYGASSTTSTGRSSQSSSQQFSGIGRSGQQPQPLMSQQFAQPPGATNMIGYMGQTAYQYPPPPPPPPPSRK

SEQ ID NO: 111 - protein, 348 aa, Homo sapiens
  ref <308>: DATABASE ACCESSION NUMBER: sw_hum/capg_human
  ref <309>: DATABASE ENTRY DATE: 1995-02-01
MYTAIPQSGSPFPGSVQDPGLHVWRVEKLKPVPVAQENQGVFFSGDSYLVLHNGPEEVSHLHLWIGQQSSRDEQGACAVLAVHLNTLLGERPVQHREVQGNESDLFMSYFPRGLKYQEGGVESAFHKTSTGAPAAIKKLYQVKGKKNIRATERALNWDSFNTGDCFILDLGQNIFAWCGGKSNILERNKARDLALAIRDSERQGKAQVEIVTDGEEPAEMIQVLGPKPALKEGNPEEDLTADKANAQAAALYKVSDATGQMNLTKVADSSPFALELLISDDCFVLDNGLCGKIYIWKGRKANEKERQAALQVAEGFISRMQYAPNTQVEILPQGRESPIFKQFFKDWK

SEQ ID NO: 112 - protein, 513 aa, Homo sapiens
  ref <308>: DATABASE ACCESSION NUMBER: sw_hum/vab1_human
  ref <309>: DATABASE ENTRY DATE: 1990-04-01
MAMEIDSRPGGLPGSSCNLGAAREHMQAVTRNYITHPRVTYRTVCSVNGPLVVLDRVKFAQYAEIVHFTLPDGTQRSGQVLEVAGTKAIVQVFEGTSGIDARKTTCEFTGDILRTPVSEDMLGRVFNGSGKPIDKGPVVMAEDFLDINGQPINPHSRIYPEEMIQTGISPIDVMNSIARGQKIPIFSAAGLPHNEIAAQICRQAGLVKKSKAVLDYHDDNFAIVFAAMGVNMETARFFKSDFEQNGTMGNVCLFLNLANDPTIERIITPRLALTTAEFLAYQCEKHVLVILTDMSSYAEALREVSAAREEVPGRRGFPGYMYTDLATIYERAGRVEGRGGSITQIPILTMPNDDITHPIPDLTGFITEGQIYVDRQLHNRQIYPPINVLPSLSRLMKSAIGEGMTRKDHGDVSNQLYACYAIGKDVQAMKAVVGEEALTSEDLLYLEFLQKFEKNFINQGPYENRSMFESLDLSWKLLRIFPKEMLKRIPQAVIDEFYSREGRLQDLAPDTAL

SEQ ID NO: 113 - protein, 858 aa, Homo sapiens
  ref <308>: DATABASE ACCESSION NUMBER: sw_hum/ubp5_human
  ref <309>: DATABASE ENTRY DATE: 1996-02-01
MAELSEEALLSVLPTIRVPKAGDRVHKDECAFSFDTPESEGGLYICMNTFLGFGKQYVERHFNKTGQRVYLHLRRTRRPKEEDPATGTGDPPRKKPTRLAIGVEGGFDLSEEKFELDEDVKIVILPDYLEIARDGLGGLPDIVRDRVTSAVEALLSADSASRKQEVQAWDGEVRQVSKHAFSLKQLDNPARIPPCGWKCSKCDMRENLWLNLTDGSILCGRRYFDGSGGNNHAVEHYRETGYPLAVKLGTITPDGADVYSYDEDDMVLDPSLAEHLSHFGIDMLKMQKTDKTMTELEIDMNQRIGEWELIQESGVPLKPLFGPGYTGIRNLGNSCYLNSVVQVLFSIPDFQRKYVDKLEKIFQNAPTDPTQDFSTQVAKLGHGLLSGEYSKPVPESGDGERVPEQKEVQDGIAPRMFKALIGKGHPEFSTNRQQDAQEFFLHLINMVERNCRSSENPNEVFRFLVEEKIKCLATEKVKYTQRVDYIMQLPVPMDAALNKEELLEYEEKKRQAEEEKMALPELVRAQVPFSSCLEAYGAPEQVDDFWSTALQAKSVAVKTTRFASFPDYLVIQIKKFTFGLDWVPKKLDVSIEMPEELDISQLRGTGLQPGEEELPDIAPPLVTPDEPKGSLGFYGNEDEDSFCSPHFSSPTSPMLDESVIIQLVEMGFPMDACRKAVYYTGNSGAEAAMNWVMSHMDDPDFANPLILPGSSGPGSTSAAADPPPEDCVTTIVSMGFSRDQALKALRATNNSLERAVDWIFSHIDDLDAEAAMDISEGRSAADSISESVPVGPKVRDGPGKYQLFAFISHMGTSTMCGHYVCHIKKEGRWVIYNDQKVCASEKPPKDLGYIYFYQRVAS

SEQ ID NO: 114 - protein, 324 aa, Homo sapiens
  ref <308>: DATABASE ACCESSION NUMBER: tr_hum/q9bvh9
  ref <309>: DATABASE ENTRY DATE: 2001-06-01
MEDAKVYVAKVDCTAHSDVCSAQGVRGYPTLKLFKPGQEAVKYQGPRDFQTLENWMLQTLNEEPVTPEPEVEPPSAPELKQGLYELSASNFELHVAQGDHFIKFFAPWCGHCKALAPTWEQLALGLEHSETVKIGKVDCTQHYELCSGNQVRGYPTLLWFRDGKKVDQYKGKRDLESLREYVESQLQRTETGATETVTPSEAPVLAAEPEADKGTVLALTENNFDDTIAEGITFIKFYAPWCGHCKTLAPTWEELSKKEFPGLAGVKIAEVDCTAERNICSKYSVRGYPTLLLFRGGKKVSEHSGGRDLDSLHRFVLSQAKDEL

SEQ ID NO: 115 - protein, 475 aa, Homo sapiens
  ref <308>: DATABASE ACCESSION NUMBER: sw_hum/cgl1_human
  ref <309>: DATABASE ENTRY DATE: 2003-02-28
MAALTTLFKYIDENQDRYIKKLAKWVAIQSVSAWPEKRGEIRRMMEVAAADVKQLGGSVELVDIGKQKLPDGSEIPLPPILLGRLGSDPQKKTVCIYGHLDVQPAALEDGWDSEPFTLVERDGKLYGRGSTDDKGPVAGWINALEAYQKTGQEIPVNVRFCLEGMEESGSEGLDELIFARKDTFFKDVDYVCISDNYWLGKKKPCITYGLRGICYFFIEVECSNKDLHSGVYGGSVHEAMTDLILLMGSLVDKRGNILIPGINEAVAAVTEEEHKLYDDIDFDIEEFAKDVGAQILLHSHKKDILMHRWRYPSLSLHGIEGAFSGSGAKTVIPRKVVGKFSIRLVPNMTPEVVGEQVTSYLTKKFAELRSPNEFKVYMGHGGKPWVSDFSHPHYLAGRRAMKTVFGVEPDLTREGGSIPVTLTFQEATGKNVMLLPVGSADDGAHSQNEKLNRYNYIEGTKMLAAYLYEVSQLKD

SEQ ID NO: 116 - protein, 465 aa, Homo sapiens
  ref <308>: DATABASE ACCESSION NUMBER: sw_hum/vime_human
  ref <309>: DATABASE ENTRY DATE: 1988-01-01
STRSVSSSSYRRMFGGPGTASRPSSSRSYVTTSTRTYSLGSALRPSTSRSLYASSPGGVYATRSSAVRLRSSVPGVRLLQDSVDFSLADAINTEFKNTRTNEKVELQELNDRFANYIDKVRFLEQQNKILLAELEQLKGQGKSRLGDLYEEEMRELRRQVDQLTNDKARVEVERDNLAEDIMRLREKLQEEMLQREEAENTLQSFRQDVDNASLARLDLERKVESLQEEIAFLKKLHEEEIQELQAQIQEQHVQIDVDVSKPDLTAALRDVRQQYESVAAKNLQEAEEWYKSKFADLSEAANRNNDALRQAKQESTEYRRQVQSLTCEVDALKGTNESLERQMREMEENFAVEAANYQDTIGRLQDEIQNMKEEMARHLREYQDLLNVKMALDIEIATYRKLLEGEESRISLPLPNFSSLNLRETNLDSLPLVDTHSKRTFLIKTVETRDGQVINETSQHHDDLE

SEQ ID NO: 117 - protein, 139 aa, Homo sapiens [sequence omitted]

SEQ ID NO: 118 - protein, 243 aa, Homo sapiens
  ref <308>: DATABASE ACCESSION NUMBER: sw_hum/rs3_human
  ref <309>: DATABASE ENTRY DATE: 1991-11-01
MAVQISKKRKFVADGIFKAELNEFLTRELAEDGYSGVEVRVTPTRTEIIILATRTQNVLGEKGRRIRELTAVVQKRFGFPEGSVELYAEKVATRGLCAIAQAESLRYKLLGGLAVRRACYGVLRFIMESGAKGCEVVVSGKLRGQRAKSMKFVDGLMIHSGDPVNYYVDTAVRHVLLRQGVLGIKVKIMLPWDPTGKIGPKKPLPDHVSIVEPKDEILPTTPISEQKGGKPEPPAMPQPVPTA

SEQ ID NO: 119 - protein, 297 aa, Homo sapiens
  ref <308>: DATABASE ACCESSION NUMBER: sw_hum/nadc_human
  ref <309>: DATABASE ENTRY DATE: 1997-11-01
MDAEGLALLLPPVTLAALVDSWLREDCPGLNYAALVSGAGPSQAALWAKSPGVLAGQPFFDAIFTQLNCQVSWFLPEGSKLVPVARVAEVRGPAHCLLLGERVALNTLARCSGIASAAAAAVEAARGAGWTGHVAGTRKTTPGFRLVEKYGLLVGGAASHRYDLGGLVMVKDNHVVAAGGVEKAVRAARQAADFALKVEVECSSLQEAVQAAEAGADLVLLDNFKPEELHPTATVLKAQFPSVAVEASGGITLDNLPQFCGPHIDVISMGMLTQAAPALDFSLKLFAKEVAPVPKIH

SEQ ID NO: 120 - protein, 279 aa, Homo sapiens
  ref <308>: DATABASE ACCESSION NUMBER: humangp/chr5-q96nm0
  ref <309>: DATABASE ENTRY DATE: 2003-04-22
MLLAASKVLDRLKPVIGVNTDPERSEGHLCLPVRYTHSFPEALQKFYRGEFRWLWRQRIRLYLEGTGINPVPVDLHEQQLSLNQHNRALNIERAHDERSEASGPQLLPVRALNEVFIGESLSSRASYYEISVDDGPWEKQKSSGLNLCTGTGSKAWSFNINRVATQAVEDVLNIAKRQGNLSLPLNRELVEKVTNEYNESLLYSPEEPKILFSIREPIANRVFSSSRQRCFSSKVCVRSRCWDACMVVDGGTSFEFNDGAIASMMINKEDELRTVLLEQ

SEQ ID NO: 121 - protein, 346 aa, Homo sapiens
  ref <308>: DATABASE ACCESSION NUMBER: humangp/chr19-095717
  ref <309>: DATABASE ENTRY DATE: 2003-04-22
MVEKEEAGGGISEEEAAQYDRQIRLWGLEAQKRLRASRVLLVGLKGLGAEIAKNLILAGVKGLTMLDHEQVTPEDPGAQFLIRTGSVGRNRAEASLERAQNLNPMVDVKVDTEDIEKKPESFFTQFDAVCLTCCSRDVIVKVDQICHKNSIKFFTGDVFGYHGYTFANLGEHEFVEEKTKVAKVSQGVEDGPDTKRAKLDSSETTMVKKKVVFCPVKEALEVDWSSEKAKAALKRTTSDYFLLQVLLKFRTDKGRDPSSDTYEEDSELLLQIRNDVLDSLGISPDLLPEDFVRYCFSEMAPVCAVVGGILAQEIVKALSQRDPPHNNFFFFDGMKGNGIVECLGPK

SEQ ID NO: 122 - protein, 289 aa, Homo sapiens
  ref <308>: DATABASE ACCESSION NUMBER: sw_hum/gnpi_human
  ref <309>: DATABASE ENTRY DATE: 1995-11-01
MKLIILEHYSQASEWAAKYIRNRIIQFNPGPEKYFTLGLPTGSTPLGCYKKLIEYYKNGDLSFKYVKTFNMDEYVGLPRDHPESYHSFMWNNFFKHIDIHPENTHILDGNAVDLQAECDAFEEKIKAAGGIELFVGGIGPDGHIAFNEPGSSLVSRTRVKTLAMDTILANARFFDGELTKVPTMALTVGVGTVMDAREVMILITGAHKAFALYKAIEEGVNHMWTVSAFQQHPRTVFVCDEDATLELKVKTVKYFKGLMLVHNKLVDPLYSIKEKETEKSQSSKKPYSD

SEQ ID NO: 123 - protein, 344 aa, Homo sapiens
  ref <308>: DATABASE ACCESSION NUMBER: sw_hum/nagk_human
  ref <309>: DATABASE ENTRY DATE: 2003-02-28
MAAIYGGVEGGGTRSEVLLVSEDGKILAEADGLSTNHWLIGTDKCVERINEMVNRAKRKAGVDPLVPLRSLGLSLSGGDQEDAGRILIEELRDRFPYLSESYLITTDAAGSIATATPDGGVVLISGTGSNCRLINPDGSESGCGGWGHMMGDEGSAYWIAHQAVKIVFDSIDNLEAAPHDIGYVKQAMFHYFQVPDRLGILTHLYRDFDKCRFAGFCRKIAEGAQQGDPLSRYIFRKAGEMLGRHIVAVLPEIDPVLFQGKIGLPILCVGSVWKSWELLKEGFLLALTQGREIQAQNFFSSFTLMKLRHSSALGGASLGARHIGHLLPMDYSANAIAFYSYTFS

SEQ ID NO: 124 - protein, 222 aa, Homo sapiens [sequence omitted]

SEQ ID NO: 125 - protein, 282 aa, Homo sapiens
  ref <308>: DATABASE ACCESSION NUMBER: sw_hum/estd_human
  ref <309>: DATABASE ENTRY DATE: 1989-07-01
MALKQISSNKCFGGLQKVFEHDSVELNCKMKFAVYLPPKAETGKCPALYWLSGLTCTEQNFISKSGYHQSASEHGLVVIAPDTSPRGCNIKGEDESWDFGTGAGFYVDATEDPWKTNYRMYSYVTEELPQLINANFPVDPQRMSIFGHSMGGHGALICALKNPGKYKSVSAFAPICNPVLCPWGKKAFSGYLGTDQSKWKAYDATHLVKSYPGSQLDILIDQGKDDQFLLDGQLLPDNFIAACTEKKIPVVFRLQEGYDHSYYFIATFITDHIRHHAKYLNA

SEQ ID NO: 126 - protein, 504 aa, Homo sapiens
  ref <308>: DATABASE ACCESSION NUMBER: sw_hum/glym_human
  ref <309>: DATABASE ENTRY DATE: 1994-02-01
MLYFSLFWAARPLQRCGQLVRMAIRAQHSNAAQTQTGEANRGWTGQESLSDSDPEMWELLQREKDRQCRGLELIASENFCSRAALEALGSCLNNKYSEGYPGKRYYGGAEVVDEIELLCQRRALEAFDLDPAQWGVNVQPYSGSPANLAVYTALLQPHDRIMGLDLPDGGHLTHGYMSDVKRISATSIFFESMPYKLNPKTGLIDYNQLALTARLFRPRLIIAGTSAYARLIDYARMREVCDEVKAHLLADMAHISGLVAAKVIPSPFKHADIVTTTTHKTLRGARSGLIFYRKGVKAVDPKTGREIPYTFEDRINFAVFPSLQGGPHNHAIAAVAVALKQACTPMFREYSLQVLKNARAMADALLERGYSLVSGGTDNHLVLVDLRPKGLDGARAERVLELVSITANKNTCPGDRSAITPGGLRLGAPALTSRQFREDDFRRVVDFIDEGVNIGLEVKSKTAKLQDFKSFLLKDSETSQRLANLRQRVEQFARAFPMPGFDEH

SEQ ID NO: 127 - protein, 452 aa, Homo sapiens
  ref <308>: DATABASE ACCESSION NUMBER: sw_hum/idhp_human
  ref <309>: DATABASE ENTRY DATE: 1996-02-01
MAGYLRVVRSLCRASGSRPAWAPAALTAPTSQEQPRRHYADKRIKVAKPVVEMDGDEMTRIIWQFIKEKLILPHVDIQLKYFDLGLPNRDQTDDQVTIDSALATQKYSVAVKCATITPDEARVEEFKLKKMWKSPNGTIRNILGGTVFREPIICKNIPRLVPGWTKPITIGRHAHGDQYKATDFVADRAGTFKMVFTPKDGSGVKEWEVYNFPAGGVGMGMYNTDESISGFAHSCFQYAIQKKWPLYMSTKNTILKAYDGRFKDIFQEIFDKHYKTDFDKNKIWYEHRLIDDMVAQVLKSSGGFVWACKNYDGDVQSDILAQGFGSLGLMTSVLVCPDGKTIEAEAAHGTVTRHYREHQKGRPTSTNPIASIFAWTRGLEHRGKLDGNQDLIRFAQMLEKVCVETVESGAMTKDLAGCIHGLSNVKLNEHFLNTTDFLDTIKSNLDRALGRQ

SEQ ID NO: 128 - protein, 263 aa, Homo sapiens
  ref <308>: DATABASE ACCESSION NUMBER: sw_hum/psa1_human
  ref <309>: DATABASE ENTRY DATE: 1992-05-01
MFRNQYDNDVTVWSPQGRIHQIEYAMEAVKQGSATVGLKSKTHAVLVALKRAQSELAAHQKKILHVDNHIGISIAGLTADARLLCNFMRQECLDSRFVFDRPLPVSRLVSLIGSKTQIPTQRYGRRPYGVGLLIAGYDDMGPHIFQTCPSANYFDCRAMSIGARSQSARTYLERHMSEFMECNLNELVKHGLRALRETLPAEQDLTTKNVSIGIVGKDLEFTIYDDDDVSPFLEGLEERPQRKAQPAQPADEPAEKADEPMEH

SEQ ID NO: 129 - protein, 740 aa, Homo sapiens
  ref <308>: DATABASE ACCESSION NUMBER: sw_hum/k6a3_human
  ref <309>: DATABASE ENTRY DATE: 1996-10-01
MPLAQLADPWQKMAVESPSDSAENGQQIMDEPMGEEEINPQTEEVSIKEIAITHHVKEGHEKADPSQFELLKVLGQGSFGKVFLVKKISGSDARQLYAMKVLKKATLKVRDRVRTKMERDILVEVNHPFIVKLHYAFQTEGKLYLILDFLRGGDLFTRLSKEVMFTEEDVKFYLAELALALDHLHSLGIIYRDLKPENILLDEEGHIKLTDFGLSKESIDHEKKAYSFCGTVEYMAPEVVNRRGHTQSADWWSFGVLMFEMLTGTLPFQGKDRKETMTMILKAKLGMPQFLSPEAQSLLRMLFKRNPANRLGAGPDGVEEIKRHSFFSTIDWNKLYRREIHPPFKPATGRPEDTFYFDPEFTAKTPKDSPGIPPSANAHQLFRGFSFVAITSDDESQAMQTVGVHSIVQQLHRNSIQFTDGYEVKEDIGVGSYSVCKRCIHKATNMEFAVKIIDKSKRDPTEEIEILLRYGQHPNIITLKDVYDDGKYVYVVTELMKGGELLDKILRQKFFSEREASAVLFTITKTVEYLHAQGVVHRDLKPSNILYVDESGNPESIRICDFGFAKQLRAENGLLMTPCYTANFVAPEVLKRQGYDAACDIWSLGVLLYTMLTGYTPFANGPDDTPEEILARIGSGKFSLSGGYWNSVSDTAKDLVSKMLHVDPHQRLTAALVLRHPWIVHWDQLPQYQLNRQDAPHLVKGAMAATYSALNRNQSPVLEPVGRSTLAQRRGIKKITSTAL

SEQ ID NO: 130 - protein, 194 aa, Homo sapiens
  ref <308>: DATABASE ACCESSION NUMBER: humangp/chr20-014878
  ref <309>: DATABASE ENTRY DATE: 2003-04-22
MAASLVGKKIVFVTGNAKKLEEVVQILGDKFPCTLVAQKIDLPEYQGEPDEISIQKCQEAVRQVQGPVLVEDTCLCFNALGGLPGPYIKWFLEKLKPEGLHQLLAGFEDKSAYALCTFALSTGDPSQPVRLFRGRTSGRIVAPRGCQDFGWDPCFQPDGYEQTYAEMPKAEKNAVSHRFRALLELQEYFGSLAA

SEQ ID NO: 131 - protein, 524 aa, Homo sapiens
  ref <308>: DATABASE ACCESSION NUMBER: sw_hum/pak2_human
  ref <309>: DATABASE ENTRY DATE: 1997-11-01
MSDNGELEDKPPAPPVRMSSTIFSTGGKDPLSANHSLKPLPSVPEEKKPRHKIISIFSGTEKGSKKKEKERPEISPPSDFEHTIHVGFDAVTGEFTGMPEQWARLLQTSNITKLEQKKNPQAVLDVLKFYDSNTVKQKYLSFTPPEKDGLPSGTPALNAKGTEAPAVVTEEEDDDEETAPPVIAPRPDHTKSIYTRSVIDPVPAPVGDSHVDGAAKSLDKQKKKPKMTDEEIMEKLRTIVSIGDPKKKYTRYEKIGQGASGTVFTATDVALGQEVAIKQINLQKQPKKELIINEILVMKELKNPNIVNFLDSYLVGDELFVVMEYLAGGSLTDVVTETCMDEAQIAAVCRECLQALEFLHANQVIHRDIKSDNVLLGMEGSVKLTDFGFCAQITPEQSKRSTMVGTPYWMAPEVVTRKAYGPKVDIWSLGIMAIEMVEGEPPYLNENPLRALYLIATNGTPELQNPEKLSPIFRDFLNRCLEMDVEKRGSAKELLQHPFLKLAKPLSSLTPLIMAAKEAMKSNR

SEQ ID NO: 132 - protein, 688 aa, Homo sapiens
  ref <308>: DATABASE ACCESSION NUMBER: sw_hum/mepd_human
  ref <309>: DATABASE ENTRY DATE: 1996-10-01
KPPAACAGDMADAASPCSVVNDLRWDLSAQQIEERTRELIEQTKRVYDQVGTQEFEDVSYESTLKALADVEVTYTVQRNILDFPQHVSPSKDIRTASTEADKKLSEFDVEMSMREDVYQRIVWLQEKVQKDSLRPEAARYLERLIKLGRRNGLHLPRETQENIKRIKKKLSLLCIDFNKNLNEDTTFLPFTLQELGGLPEDFLNSLEKMEDGKLKVTLKYPHYFPLLKKCHVPETRRKVEEAFNCRCKEENCAILKELVTLRAQKSRLLGFHTHADYVLEMNMAKTSQTVATFLDELAQKLKPLGEQERAVILELKRAECERRGLPFDGRIRAWDMRYYMNQVEETRYCVDQNLLKEYFPVQVVTHGLLGIYQELLGLAFHHEEGASAWHEDVRLYTARDAASGEVVGKFYLDLYPREGKYGHAACFGLQPGCLRQDGSRQIAIAAMVANFTKPTADAPSLLQHDEVETYFHEFGHVMHQLCSQAEFAMFSGTHVERDFVEAPSQMLENWVWEQEPLLRMSRHYRTGSAVPRELLEKLIESRQANTGLFNLRQIVLAKVDQALHTQTDADPAEEYARLCQEILGVPATPGTNMPATFGHLAGGYDAQYYGYLWSEVYSMDMFHTRFKQEGVLNSKVGMDYRSCILRPGGSEDASAMLRRFLGRDPKQDAFLLSKGLQVGGCEPEPQVC

SEQ ID NO: 133 - protein, 208 aa, Homo sapiens [sequence omitted]

SEQ ID NO: 134 - protein, 360 aa, Homo sapiens [sequence omitted]

SEQ ID NO: 135 - protein, 563 aa, Homo sapiens
  ref <308>: DATABASE ACCESSION NUMBER: sw_hum/mccb_human
  ref <309>: DATABASE ENTRY DATE: 2003-02-28
MWAVLRLALRPCARASPAGPRAYHGDSVASLGTQPDLGSALYQENYKQMKALVNQLHERVEHIKLGGGEKARALHISRGKLLPRERIDNLIDPGSPFLELSQFAGYQLYDNEEVPGGGIITGIGRVSGVECMIIANDATVKGGAYYPVTVKKQLRAQEIAMQNRLPCIYLVDSGGAYLPRQADVFPDRDHFGRTFYNQAIMSSKNIAQIAVVMGSCTAGGAYVPAMADENIIVRKQGTIFLAGPPLVKAATGEEVSAEDLGGADLHCRKSGVSDHWALDDHHALHLTRKVVRNLNYQKKLDVTIEPSEEPLFPADELYGIVGANLKRSFDVREVIARIVDGSRFTEFKAFYGDTLVTGFARIFGYPVGIVGNNGVLFSESAKKGTHFVQLCCQRNIPLLFLQNITGFMVGREYEAEGIAKDGAKMVAAVACAQVPKITLIIGGSYGAGNYGMCGRAYSPRFLYIWPNARISVMGGEQAANVLATITKDQRAREGKQFSSADEAALKEPIIKKFEEEGNPYYSSARVWDDGIIDPADTRLVLGLSFSAALNAPIEKTDFGIFRM

SEQ ID NO: 136 - protein, 1410 aa, Homo sapiens
  ref <308>: DATABASE ACCESSION NUMBER: sw_hum/rrb1_human
  ref <309>: DATABASE ENTRY DATE: 2003-02-28
MDIYDTQTLGVVVFGGFMVVSAIGIFLVSTFSMKETSYEEALANQRKEMAKTHHQKVEKKKKEKTVEKKGKTKKKEEKPNGKIPDHDPAPNVTVLLREPVRAPAVAVAPTPVQPPIIVAPVATVPAMPQEKLASSPKDKKKKEKKVAKVEPAVSSVVNSIQVLTSKAAILETAPKEVPMVVVPPVGAKGNTPATGTTQGKKAEGTQNQSKKAEGAPNQGRKAEGTPNQGKKTEGTPNQGKKAEGTPNQGKKAEGTPNQGKKAEGAQNQGKKVDTTPNQGKKVEGAPTQGRKAEGAQNQAKKVEGAQNQGKKAEGAQNQGKKGEGAQNQGKKAEGAQNQGKKAEGAQNQGKKAEGAQNQGKKAEGAQNQGKKAEGAQNQGKKSEGAQNQGKKVEGAQNQGKKAEGAQNQGKKAEGAQNQGKKAEGAQNQGKKAEGAQNQGKKAEGAQNQGKKAEGAQNQGKKAEGAQNQGKKVEGAQNQGKKAEGAQNQGKKAEGAQNQGKKAEGAQNQGQKGEGAQNQGKKTEGAQGKKAERSPNQGKKGEGAPIQGKKADSVANQGTKVEGITNQGKKAEGSPSEGKKAEGSPNQGKKADAAANQGKKTESASVQGRNTDVAQSPEAPKQEAPAKKKSGSKKKGEPGPPDADGPLYLPYKTLVSTVGSMVFNEGEAQRLIEILSEKAGIIQDTWHKATQKGDPVAILKRQLEEKEKLLATEQEDAAVAKSKLRELNKEMAAEKAKAAAGEAKVKKQLVAREQEITAVQARMQASYREHVKEVQQLQGKIRTLQEQLENGPNTQLARLQQENSILRDALNQATSQVESKQNAELAKLRQELSKVSKELVEKSEAVRQDEQQRKALEAKAAAFEKQVLQLQASHRESEEALQKRLDEVSRELCHTQSSHASLRADAEKAQEQQQQMAELHSKLQSSEAEVRSKCEELSGLHGQLQEARAENSQLTERIRSIEALLEAGQARDAQDVQASQAEADQQQTRLKELESQVSGLEKEAIELREAVEQQKVKNNDLREKNWKAMEALATAEQACKEKLLSLTQAKEESEKQLCLIEAQTMEALLALLPELSVLAQQNYTEWLQDLKEKGPTLLKHPPAPAEPSSDLASKLREAEETQSTLQAECDQYRSILAETEGMLRDLQKSVEEEEQVWRAKVGAAEEELQKSRVTVKHLEEIVEKLKGELESSDQVREHTSHLEAELEKHMAAASAECQNYAKEVAGLRQLLLESQSQLDAAKSEAQKQSDELALVRQQLSEMKSHVEDGDIAGAPASSPEAPPAEQDPVQLKTQLEWTEAILEDEQTQRQKLTAEFEEAQTSACRLQEELEKLRTAGPLESSETEEASQLKERLEKEKKLTSDLGRAATRLQELLKTTQEQLAREKDTVKKLQEQLEKAEDGSSSKEGTSV

SEQ ID NO: 137 - protein, 360 aa, Homo sapiens
  ref <308>: DATABASE ACCESSION NUMBER: tr_hum/q96e67
  ref <309>: DATABASE ENTRY DATE: 2001-12-01
MCKAGFAGDDAPRAVFPSIVGRPRHQGVMVGMGQKDSYVGDEAQSKRGILTLKYPIEHGIVTNWDDMEKIWHHTFYNELRVAPEEHPVLLTEAPLNPKANLEKMTQIMFETFNTPAMYVAIQAVLSLYASGRTTGIVMDSGDGVTHTVPIYEGYALPHAILRLDLAGRDLTDYLMKILTERGYSFTTTAEREIVRDIKEKLCYVALDFEQEMATAASSSSLEKSYELPDGQVITIGNERFRCPEALFQPSFLGMESCGIHETTFNSIMKCDVDIRKDLYANTVLSGGTTMYPGIADRMQKEITALAPSTMKIKIIAPPERKYSVWIGGSILASLSTFQQMWISKQEYDESGPSIVHRKCF

SEQ ID NO: 138 - protein, 445 aa, Homo sapiens
  ref <308>: DATABASE ACCESSION NUMBER: sw_hum/hgd_human
  ref <309>: DATABASE ENTRY DATE: 1997-11-01
MAELKYISGFGNECSSEDPRCPGSLPEGQNNPQVCPYNLYAEQLSGSAFTCPRSTNKRSWLYRILPSVSHKPFESIDEGHVTHNWDEVDPDPNQLRWKPFEIPKASQKKVDFVSGLHTLCGAGDIKSNNGLAIHIFLCNTSMENRCFYNSDGDFLIVPQKGNLLIYTEFGKMLVQPNEICVIQRGMRFSIDVFEETRGYILEVYGVHFELPDLGPIGANGLANPRDFLIPIAWYEDRQVPGGYTVINKYQGKLFAAKQDVSPFNVVAWHGNYTPYKYNLKNFMVINSVAFDHADPSIFTVLTAKSVRPGVAIADFVIFPPRWGVADKTFRPPYYHRNCMSEFMGLIRGHYEAKQGGFLPGGGSLHSTMTPHGPDADCFEKASKVKLAPERIADGTMAFMFESSLSLAVTKWGLKASRCLDENYHKCWEPLKSHFTPNSRNPAEPN

SEQ ID NO: 139 - protein, 482 aa, Homo sapiens
  ref <308>: DATABASE ACCESSION NUMBER: sw_hum/6pgd_human
  ref <309>: DATABASE ENTRY DATE: 1996-10-01
AQADIALIGLAVMGQNLILNMNDHGFVVCAFNRTVSKVDDFLANEAKGTKVVGAQSLKEMVSKLKKPRRIILLVKAGQAVDDFIEKLVPLLDTGDIIIDGGNSEYRDTTRRCRDLKAKGILFVGSGVSGGEEGARYGPSLMPGGNKEAWPHIKTIFQGIAAKVGTGEPCCDWVGDEGAGHFVKMVHNGIEYGDMQLICEAYHLMKDVLGMAQDEMAQAFEDWNKTELDSFLIEITANILKFQDTDGKHLLPKIRDSAGQKGTGKWTAISALEYGVPVTLIGEAVFARCLSSLKDERIQASKKLKGPQKFQFDGDKKSFLEDIRKALYASKIISYAQGFMLLRQAATEFGWTLNYGGIALMWRGGCIIRSVFLGKIKDAFDRNPELQNLLLDDFFKSAVENCQDSWRRAVSTGVQAGIPMPCFTTALSFYDGYRHEMLPASLIQAQRDYFGAHTYELLAKPGQFIHTNWTGHGGTVSSSSYNA

SEQ ID NO: 140 - protein, 411 aa, Homo sapiens
  ref <308>: DATABASE ACCESSION NUMBER: sw_hum/if4n_human
  ref <309>: DATABASE ENTRY DATE: 1995-02-01
MATTATMATSGSARKRLLKEEDMTKVEFETSEEVDVTPTFDTMGLREDLLRGIYAYGFEKPSAIQQRAIKQIIKGRDVIAQSQSGTGKTATFSISVLQCLDIQVRETQALILAPTRELAVQIQKGLLALGDYMNVQCHACIGGTNVGEDIRKLDYGQHVVAGTPGRVFDMIRRRSLRTRAIKMLVLDEADEMLNKGFKEQIYDVYRYLPPATQVVLISATLPHEILEMTNKFMTDPIRILVKRDELTLEGIKQFFVAVEREEWKFDTLCDLYDTLTITQAVIFCNTKRKVDWLTEKMREANFTVSSMHGDMPQKERESIMKEFRSGASRVLISTDVWARGLDVPQVSLIINYDLPNNRELYIHRIGRSGRYGRKGVAINFVKNDDIRILRDIEQYYSTQIDEMPMNVADLI

SEQ ID NO: 141 - protein, 453 aa, Homo sapiens
  ref <308>: DATABASE ACCESSION NUMBER: sw_hum/ucr2_human
  ref <309>: DATABASE ENTRY DATE: 1991-08-01
MKLLTRAGSFSRFYSLKVAPKVKATAAPAGAPPQPQDLEFTKLPNGLVIASLENYSPVSRIGLFIKAGSRYEDFSNLGTTHLLRLTSSLTTKGASSFKITRGIEAVGGKLSVTATRENMAYTVECLRGDVDILMEFLLNVTTAPEFRRWEVADLQPQLKIDKAVAFQNPQTHVIENLHAAAYRNALANPLYCPDYRIGKVTSEELHYFVQNHFTSARMALIGLGVSHPVLKQVAEQFLNMRGGLGLSGAKANYRGGEIREQNGDSLVHAAFVAESAVAGSAEANAFSVLQHVLGAGPHVKRGSNTTSHLHQAVAKATQQPFDVSAFNASYSDSGLFGIYTISQATAAGDVIKAAYNQVKTIAQGNLSNTDVQAAKNKLKAGYLMSVESSECFLEEVGSQALVAGSYMPPSTVLQQIDSVANADIINAAKKFVSGQKSMAASGNLGHTPFVDEL

SEQ ID NO: 142 - protein, 245 aa, Homo sapiens
  ref <308>: DATABASE ACCESSION NUMBER: s_hum/143z_human
  ref <309>: DATABASE ENTRY DATE: 1992-12-01
MDKNELVQKAKLAEQAERYDDMAACMKSVTEQGAELSNEERNLLSVAYKNVVGARRSSWRVVSSIEQKTEGAEKKQQMAREYREKIETELRDICNDVLSLLEKFLIPNASQAESKVFYLKMKGDYYRYLAEVAAGDDKKGIVDQSQQAYQEAFEISKKEMQPTHPIRLGLALNFSVFYYEILNSPEKACSLAKTAFDEAIAELDTLSEESYKDSTLIMQLLRDNLTLWTSDTQGDEAEAGEGGEN

SEQ ID NO: 143 - protein, 337 aa, Homo sapiens
  ref <308>: DATABASE ACCESSION NUMBER: sw_hum/tal1_human
  ref <309>: DATABASE ENTRY DATE: 1994-10-01
MSSSPVKRQRMESALDQLKQFTTVVADTGDFHAIDEYKPQDATTNPSLILAAAQMPAYQELVEEAIAYGRKLGGSQEDQIKNAIDKLFVLFGAEILKKIPGRVSTEVDARLSFDKDAMVARARRLIELYKEAGISKDRILIKLSSTWEGIQAGKELEEQHGIHCNMTLLFSFAQAVACAEAGVTLISPFVGRILDWHVANTDKKSYEPLEDPGVKSVTKIYNYYKKFSYKTIVMGASFRNTGEIKALAGCDFLTISPKLLGELLQDNAKLVPVLSAKAAQASDLEKIHLDEKSFRWLHNEDQMAVEKLSDGIRKFAADAVKLERMLTERMFNAENGK

SEQ ID NO: 144 - protein, 284 aa, Homo sapiens
  ref <308>: DATABASE ACCESSION NUMBER: sw_hum/nps1_human
  ref <309>: DATABASE ENTRY DATE: 2001-10-16
MAPRLCSISVTARRLLGGPGPRAGDVASAAAARFYSKDNEGSWFRSLFVHKVDPRKDAHSTLLSKKETSNLYKIQFHNVKPEYLDAYNSLTEAVLPKLHLDEDYPCSLVGNWNTWYGEQDQAVHLWRFSGGYPALMDCMNKLKNNKEYLEFRRERSQMLLSRRNQLLLEFSFWNEPQPRMGPNIYELRTYKLKPGTMIEWGNNWARAIKYRQENQEAVGGFFSQIGELYVVHHLWAYKDLQSREETRNAAWRKRGWDENVYYTVPLVRHMESRIMIPLKISPLQ

SEQ ID NO: 145 - protein, 367 aa, Homo sapiens
  ref <308>: DATABASE ACCESSION NUMBER: sw_hum/dcup_human
  ref <309>: DATABASE ENTRY DATE: 1988-01-01
MEANGLGPQGFPELKNDTFLRAAWGEETDYTPVWCMRQAGRYLPEFRETRAAQDFFSTCRSPEACCELTLQPLRRFPLDAAIIFSDILVVPQALGMEVTMVPGKGPSFPEPLREEQDLERLRDPEVVASELGYVFQAITLTRQRLAGRVPLIGFAGAPWTLMTYMVEGGGSSTMAQAKRWLYQRPQASHQLLRILTDALVPYLVGQVVAGAQALQLFESHAGHLGPQLFNKFALPYIRDVAKQVKARLREAGLAPVPMIIFAKDGHFALEELAQAGYEVVGLDWTVAPKKARECVGKTVTLQGNLDPCALYASEEEIGQLVKQMLDDFGPHRYIANLGHGLYPDMDPEHVGAFVDAVHKHSRLLRQN

SEQ ID NO: 146 - protein, 430 aa, Homo sapiens
  ref <308>: DATABASE ACCESSION NUMBER: sw_hum/aatm_human
  ref <309>: DATABASE ENTRY DATE: 1986-07-21
MALLHSGRVLPGIAAAFHPGLAAAASARASSWWTHVEMGPPDPILGVTEAFKRDTNSKKMNLGVGAYRDDNGKPYVLPSVRKAEAQIAAKNLDKEYLPIGGLAEFCKASAELALGENSEVLKSGRFVTVQTISGTGALRIGASFLQRFFKFSRDVFLPKPTWGNHTPIFRDAGMQLQGYRYYDPKTCGFDFTGAVEDISKIPEQSVLLLHACAHNPTGVDPRPEQWKEIATVVKKRNLFAFFDMAYQGFASGDGDKDAWAVRHFIEQGINVCLCQSYAKNMGLYGERVGAFTMVCKDADEAKRVESQLKILIRPMYSNPPLNGARIAAAILNTPDLRKQWLQEVKGMADRIIGMRTQLVSNLKKEGSTHNWQHITDQIGMFCFTGLKPEQVERLIKEFSIYMTKDGRISVAGVTSSNVGYLAHAIHQVTK

SEQ ID NO: 147 - protein, 233 aa, Homo sapiens
  ref <308>: DATABASE ACCESSION NUMBER: sw_hum/psa2_human
  ref <309>: DATABASE ENTRY DATE: 1992-05-01
AERGYSFSLTTFSPSGKLVQIEYALAAVAGGAPSVGIKAANGVVLATEKKQKSILYDERSVHKVEPITKHIGLVYSGMGPDYRVLVHRARKLAQQYYLVYQEPIPTAQLVQRVASVMQEYTQSGGVRPFGVSLLICGWNEGRPYLFQSDPSGAYFAWKATAMGKNYVNGKTFLEKRYNEDLELEDAIHTAILTLKESFEGQMTEDNIEVGICNEAGFRRLTPTEVKDYLAAIA

SEQ ID NO: 148 - protein, 530 aa, Homo sapiens
  ref <308>: DATABASE ACCESSION NUMBER: sw_hum/kpy1_human
  ref <309>: DATABASE ENTRY DATE: 1990-04-01
SKPHSEAGTAFIQTQQLHAAMADTFLEHMCRLDIDSPPITARNTGIICTIGPASRSVETLKEMIKSGMNVARLNFSHGTHEYHAETIKNVRTATESFASDPILYRPVAVALDTKGPEIRTGLIKGSGTAEVELKKGATLKITLDNAYMEKCDENILWLDYKNICKVVEVGSKIYVDDGLISLQVKQKGADFLVTEVENGGSLGSKKGVNLPGAAVDLPAVSEKDIQDLKFGVEQDVDMVFASFIRKASDVHEVRKVLGEKGKNIKIISKIENHEGVRRFDEILEASDGIMVARGDLGIEIPAEKVFLAQKMMIGRCNRAGKPVICATQMLESMIKKPRPTRAEGSDVANAVLDGADCIMLSGETAKGDYPLEAVRMQHLIAREAEAAIYHLQLFEELRRLAPITSDPTEATAVGAVEASFKCCSGAIIVLTKSGRSAHQVARYRPRAPIIAVTRNPQTARQAHLYRGIFPVLCKDPVQEAWAEDVDLRVNFAMNVGKARGFFKKGDVVIVLTGWRPGSGFTNTMRVVPVP

SEQ ID NO: 149 - protein, 412 aa, Homo sapiens
  ref <308>: DATABASE ACCESSION NUMBER: sw_hum/aatc_human
  ref <309>: DATABASE ENTRY DATE: 1990-08-01
APPSVFAEVPQAQPVLVFKLTADFREDPDPRKVNLGVGAYRTDDCHPWVLPVVKKVEQKIANDNSLNHEYLPILGLAEFRSCASRLALGDDSPALKEKRVGGVQSLGGTGALRIGADFLARWYNGTNNKNTPVYVSSPTWENHNAVFSAAGFKDIRSYRYWDAEKRGLDLQGFLNDLENAPEFSIVVLHACAHNPTGIDPTPEQWKQIASVMKHRFLFPFFDSAYQGFASGNLERDAWAIRYFVSEGFEFFCAQSFSKNFGLYNERVGNLTVVGKEPESILQVLSQMEKIVRITWSNPPAQGARIVASTLSNPELFEEWTGNVKTMADRILTMRSELRARLEALKTPGTWNHITDQIGMFSFTGLNPKQVEYLVNEKHIYLLPSGRINVSGLTTKNLDYVATSIHEAVTKIQ

SEQ ID NO: 150 - protein, 553 aa, Homo sapiens
  ref <308>: DATABASE ACCESSION NUMBER: sw_hum/atpa_human
  ref <309>: DATABASE ENTRY DATE: 1992-05-01
MLSVRVAAAVVRALPRRAGLVSRNALGSSFIAARNFHASNTHLQKTGTAEMSSILEERILGADTSVDLEETGRVLSIGDGIARVHGLRNVQAEEMVEFSSGLKGMSLNLEPDNVGVVVFGNDKLIKEGDIVKRTGAIVDVPVGEELLGRVVDALGNAIDGKGPIGSKTRRRVGLKAPGIIPRISVREPMQTGIKAVDSLVPIGRGQRELIIGDRQTGKTSIAIDTIINQKRFNDGSDEKKKLYCIYVAIGQKRSTVAQLVKRLTDADAMKYTIVVSATASDAAPLQYLAPYSGCSMGEYFRDNGKHALIIYDDLSKQAVAYRQMSLLLRRPPGREAYPGDVFYLHSRLLERAAKMNDAFGGGSLTALPVIETQAGDVSAYIPTNVISITDGQIFLETELFYKGIRPAINVGLSVSRVGSAAQTRAMKQVAGTMKLELAQYREVAAFAQFGSDLDAATQQLLSRGVRLTELLKQGQYSPMAIEEQVAVIYAGVRGYLDKLEPSKITKFENAFLSHVVSQHQALLGTIRADGKISEQSDAKLKEIVTNFLAGFEA

SEQ ID NO: 151 - protein, 452 aa, Homo sapiens
  ref <308>: DATABASE ACCESSION NUMBER: sw_hum/e2bg_human
  ref <309>: DATABASE ENTRY DATE: 2001-10-16
MEFQAVVMAVGGGSRMTDLTSSIPKPLLPVGNKPLIWYPLNLLERVGFEEVIVVTTRDVQKALCAEFKMKMKPDIVCIPDDADMGTADSLRYIYPKLKTDVLVLSCDLITDVALHEVVDLFRAYDASLAMLMRKGQDSIEPVPGQKGKKKAVEQRDFIGVDSTGKRLLFMANEADLDEELVIKGSILQKHPRIRFHTGLVDAHLYCLKKYIVDFLMENGSITSIRSELIPYLVRKQFSSASSQQGQEEKEEDLKKKELKSLDIYSFIKEANTLNLAPYDACWNACRGDRWEDLSRSQVRCYVHIMKEGLCSRVSTLGLYMEANRQVPKLLSALCPEEPPVHSSAQIVSKHLVGVDSLIGPETQIGEKSSIKRSVIGSSCLIKDRVTITNCLLMNSVTVEEGSNIQGSVICNNAVIEKGADIKDCLIGSGQRIEAKAKRVNEVIVGNDQLMEI

SEQ ID NO: 152 - protein, 524 aa, Homo sapiens
  ref <308>: DATABASE ACCESSION NUMBER: sw_hum/glpk_human
  ref <309>: DATABASE ENTRY DATE: 1993-10-01
MAASKKAVLGPLVGAVDQGTSSTRFLVFNSKTAELLSHHQVEIKQEFPREGWVEQDPKEILHSVYECIEKTCEKLGQLNIDISNIKAIGVSNQRETTVVWDKITGEPLYNAVVWLDLRTQSTVESLSKRIPGNNNFVKSKTGLPLSTYFSAVKLRWLLDNVRKVQKAVEEKRALFGTIDSWLIWSLTGGVNGGVHCTDVTNASRTMLFNIHSLEWDKQLCEFFGIPMEILPNVRSSSEIYGLMKAGALEGVPISGCLGDQSAALVGQMCFQIGQAKNTYGTGCFLLCNTGHKCVFSDHGLLTTVAYKLGRDKPVYYALEGSVAIAGAVIRWLRDNLGIIKTSEEIEKLAKEVGTSYGCYFVPAFSGLYAPYWEPSARGIICGLTQFTNKCHIAFAALEAVCFQTREILDAMNRDCGIPLSHLQVDGGMTSNKILMQLQADILYIPVVKPSMPETTALGAAMAAGAAEGVGVWSLEPEDLSAVTMERFEPQINAEESEIRYSTWKKAVMKSMGWVTTQSPESGIP

SEQ ID NO: 153 - protein, 293 aa, Homo sapiens [sequence omitted]

SEQ ID NO: 154 - protein, 508 aa, Homo sapiens
  ref <308>: DATABASE ACCESSION NUMBER: sw_hum/syfa_human
  ref <309>: DATABASE ENTRY DATE: 2001-10-16
MADGQVAELLLRRLEASDGGLDSAELAAELGMEHQAVVGAVKSLQALGEVIEAELRSTKHWELTAEGEEIAREGSHEARVFRSIPPEGLAQSELMRLPSGKVGFSKAMSNKWIRVDKSAADGPRVFRVVDSMEDEVQRRLQLVRGGQAEKLGEKERSELRKRKLLAEVTLKTYWVSKGSAFSTSISKQETELSPEMISSGSWRDRPFKPYNFLAHGVLPDSGHLHPLLKVRSQFRQIFLEMGFTEMPTDNFIESSFWNFDALFQPQQHPARDQHDTFFLRDPAEALQLPMDYVQRVKRTHSQGGYGSQGYKYNWKLDEARKNLLRTHTTSASARALYRLAQKKPFTPVKYFSIDRVFRNETLDATHLAEFHQIEGVVADHGLTLGHLMGVLREFFTKLGITQLRFKPAYNPYTEPSMEVFSYHQGLKKWVEVGNSGVFRPEMLLPMGLPENVSVIAWGLSLERPTMIKYGINNIRELVGHKVNLQMVYDSPLCRLDAEPRPPPTQEAA

SEQ ID NO: 155 - protein, 397 aa, Homo sapiens
  ref <308>: DATABASE ACCESSION NUMBER: sw_hum/dja1_human
  ref <309>: DATABASE ENTRY DATE: 1993-07-01
MVKETTYYDVLGVKPNATQEELKKAYRKLALKYHPDKNPNEGEKFKQISQAYEVLSDAKKRELYDKGGEQAIKEGGAGGGFGSPMDIFDMFFGGGGRMQRERRGKNVVHQLSVTLEDLYNGATRKLALQKNVICDKCEGRGGKKGAVECCPNCRGTGMQIRIHQIGPGMVQQIQSVCMECQGHGERISPKDRCKSCNGRKIVREKKILEVHIDKGMKDGQKITFHGEGDQEPGLEPGDIIIVLDQKDHAVFTRRGEDLFMCMDIQLVEALCGFQKPISTLDNRTIVITSHPGQIVKHGDIKCVLNEGMPIYRRPYEKGRLIIEFKVNFPENGFLSPDKLSLLEKLLPERKEVEETDEMDQVELVDFDPNQERRRHYNGEAYEDDEHHPRGGVQCQTS

SEQ ID NO: 156 - protein, 518 aa, Homo sapiens
  ref <308>: DATABASE ACCESSION NUMBER: sw_hum/sysm_human
  ref <309>: DATABASE ENTRY DATE: 2003-02-28
MAASMARRLWPLLTRRGFRPRGGCISNDSPRRSFTTEKRNRNLLYEYAREGYSALPQLDIERFCACPEEAAHALELRKGELRSADLPAIISTWQELRQLQEQIRSLEEEKAAVTEAVRALLANQDSGEVQQDPKYQGLRARGREIRKELVHLYPREAQLEEQFYLQALKLPNQTHPDVPVGDESQARVLHMVGDKPVFSFQPRGHLEIGEKLDIIRQKRLSHVSGHRSYYLRGAGALLQHGLVNFTFNKLLRRGFTPMTVPDLLRGAVFEGCGMTPNANPSQIYNIDPARFKDLNLAGTAEVGLAGYFMDHTVAFRDLPVRMVCSSTCYRAETNTGQEPRGLYRVHHFTKVEMFGVTGPGLEQSSQLLEEFLSLQMEILTELGLHFRVLDMPTQELGLPAYRKFDIEAWMPGRGRFGEVTSASNCTDFQSRRLHIMFQTEAGELQFAHTVNATACAVPRLLIALLESNQQKDGSVLVPPALQSYLGTDRITAPTHVPLQYIGPNQPRKPGLPGQPAVS

SEQ ID NO: 157 - protein, 279 aa, Homo sapiens
  ref <308>: DATABASE ACCESSION NUMBER: sw_hum/hax1_human
  ref <309>: DATABASE ENTRY DATE: 1998-07-15
MSLFDLFRGFFGFPGPRSHRDPFFGGMTRDEDDDEEEEEEGGSWGRGNPRFHSPQHPPEEFGFGFSFSPGGGIRFHDNFGFDDLVRDFNSIFSDMGAWTLPSHPPELPGPESETPGERLREGQTLRDSMLKYPDSHQPRIFGGVLESDARSESPQPAPDWGSQRPFHRFDDVWPMDPHPRTREDNDLDSQVSQEGLGPVLQPQPKSYFKSISVTKITKPDGIVEERRTVVDSEGRTETTVTRHEADSSPRGDPESPRPPALDDAFSILDLFLGRWFRSR

SEQ ID NO: 158 - protein, 476 aa, Homo sapiens
  ref <308>: DATABASE ACCESSION NUMBER: humangp/chr19-q96g16
  ref <309>: DATABASE ENTRY DATE: 2003-04-22
MVSKRIAQETFDAAVRENIEEFAMGPEEAVKEAVEQFESQGVDLSNIVKTAPKVSADGSQEPTHDILQMLSDLQESVASSRPQEVSAYLTRFCDQCKQDKACRFLAAQKGAYPIIFTAWKLATAGDQGLLLQSLNALSVLTDGQPDLLDAQGLQLLVATLTQNADEADLTCSGIRCVRHACLKHEQNRQDLVKAGVLPLLTGAITHHGHHTDVVREACWALRVMTFDDDIRVPFGHAHNHAKMIVQENKGLKVLIEATKAFLDNPGILSELCGTLSRLAIRNEFCQEVVDLGGLSILVSLLADCNDHQMRDQSGVQELVKQVLSTLRAIAGNDDVKDAIVRAGGTESIVAAMTQHLTSPQVCEQSCAALCFLALRKPDNSRIIVEGGGAVAALQAMKAHPQKAGVQKQACMLIRNLVAHGQAFSKPILDLGAEALIMQARSAHRDCEDVAKAALRDLGCHVELRELWTGQRGNLAP

SEQ ID NO: 159 - protein, 319 aa, Homo sapiens
  ref <308>: DATABASE ACCESSION NUMBER: human/chr10-q9hbk9
  ref <309>: DATABASE ENTRY DATE: 2003-04-22
QTYYGQVLKRSADLQTNGCVTTARPVPKHIREALQNVHEEVALRYYGCGLVIPEHLENCWILDLGSGSGRDCYVLSQLVGEKGHVTGIDMTKGQVEVAEKYLDYHMEKYGFQASNVTFIHGYIEKLGEAGIKNESHDIVVSNCVINLVPDKQQVLQEAYRVLKHGGELYFSDVYTSLELPEEIRTHKVLWGECLGGALYWKELAVLAQKIGFCPPRLVTANLITIQNKELERVIGDCRFVSATFRLFKHSKTGPTKRCQVIYNGGITGHEKELMFDANFTFKEGEIVEVDEETAAILKNSRFAQDFLIRPIGEKLPTSG

SEQ ID NO: 160 - protein, 392 aa, Homo sapiens
  ref <308>: DATABASE ACCESSION NUMBER: sw_hum/sps1_human
  ref <309>: DATABASE ENTRY DATE: 1996-10-01
MSTRESFNPESYELDKSFRLTRFTELKGTGCKVPQDVLQKLLESLQENHFQEDEQFLGAVMPRLGIGMDTCVIPLRHGGLSLVQTTDYIYPIVDDPYMMGRIACANVLSDLYAMGVTECDNMLMLLGVSNKMTDRERDKVMPLIIQGFKDAAEEAGTSVTGGQTVLNPWIVLGGVATTVCQPNEFIMPDNAVPGDVLVLTKPLGTQVAVAVHQWLDIPEKWNKIKLVVTQEDVELAYQEAMMNMARLNRTAAGLMHTFNAHAATDITGFGILGHAQNLAKQQRNEVSFVIHNLPVLAKMAAVSKACGNMFGLMHGTCPETSGGLLICLPREQAARFCAEIKSPKYGEGHQAWIIGIVEKGNRTARIIDKPRIIEVAPQVATQNVNPTPGATS

SEQ ID NO: 161 - protein, 814 aa, Homo sapiens
  ref <308>: DATABASE ACCESSION NUMBER: sw_hum/if39_human
  ref <309>: DATABASE ENTRY DATE: 1997-11-01
MQDAENVAVPEAAEERAEPGQQQPAAEPPPAEGLLRPAGPGAPEAAGTEASSEEVGIAEAGPEPEVRTEPAAEAEAASGPSESPSPPAAEELPGSHAEPPVPAQGEAPGEQARDERSDSRAQAVSEDAGGNEGRAAEAEPRALENGDADEPSFSDPEDFVDDVSEEELLGDVLKDRPQEADGIDSVIVVDNVPQVGPDRLEKLKNVIHKIFSKFGKITNDFYPEEDGKTKGYIFLEYASPAHAVDAVKNADGYKLDKQHTFRVNLFTDFDKYMTISDEWDIPEKQPFKDLGNLRYWLEEAECRDQYSVIFESGDRTSIFWNDVKDPVSIEERARWTETYVRWSPKGTYLATFHQRGIALWGGEKFKQIQRFSHQGVQLIDFSPCERYLVTFSPLMDTQDDPQAIIIWDILTGHKKRGFHCESSAHWPIFKWSHDGKFFARMTLDTLSIYETPSMGLLDKKSLKISGIKDFSWSPGGNIIAFWVPEDKDIPARVTLMQLPTRQEIRVRNLFNVVDCKLHWQKNGDYLCVKVDRTPKGTQGVVTNFEIFRMREKQVPVDVVEMKETIIAFAWEPNGSKFAVLHGEAPRISVSFYHVKNNGKIELIKMFDKQQANTIFWSPQGQFVVLAGLRSMNGALAFVDTSDCTVMNIAEHYMASDVEWDPTGRYVVTSVSWWSHKVDNAYWLWTFQGRLLQKNNKDRFCQLLWRPRPPTLLSQEQIKQIKKDLKKYSKIFEQKDRLSQSKASKELVERRRTMMEDFRKYRKMAQELYMEQKNERLELRGGVDTDELDSNVDDWEEETIEFFVTEEIIPLGNQE

SEQ ID NO: 162 - protein, 461 aa, Homo sapiens
  ref <308>: DATABASE ACCESSION NUMBER: sw_hum/ncb1_human
  ref <309>: DATABASE ENTRY DATE: 1993-07-01
MPPSGPRGTLLLLPLLLLLLLRAVLAVPLERGAPNKEETPATESPDTGLYYHRYLQEVIDVLETDGHFREKLQAANAEDIKSGKLSRELDFVSHHVRTKLDELKRQEVSRLRMLLKAKMDAEQDPNVQVDHLNLLKQFEHLDPQNQHTFEARDLELLIQTATRDLAQYDAAHHEEFKRYEMLKEHERRRYLESLGEEQRKEAERKLEEQQRRHREHPKVNVPGSQAQLKEVWEELDGLDPNRFNPKTFFILHDINSDGVLDEQELEALFTKELEKVYDPKNEEDDMREMEEERLRMREHVMKNVDTNQDRLVTLEEFLASTQRKEFGDTGEGWETVEMHPAYTEEELRRFEEELAAREAELNAKAQRLSQETEALGRSQGRLEAKKRELLLAVLHMEQQKQQQQQQQGHKAPAAHPEGQLKFHPDTDDVPVPAPAGDQKEVDTSEKKLLERLPEVEVPQHL

SEQ ID NO: 163 - protein, 297 aa, Homo sapiens
  ref <308>: DATABASE ACCESSION NUMBER: sw_hum/y33k_human
  ref <309>: DATABASE ENTRY DATE: 1996-10-01
MAELTALESLIEMGFPRGRAEKALALTGNQGIEAAMDWLMEHEDDPDVDEPLETPLGHILGREPTSSEQGGLEGSGSAAGEGKPALSEEERQEQTKRMLELVAQKQREREEREEREALERERQRRRQGQELSAARQRLQEDEMRRAAEERRREKAEELAARQRVREKIERDKAERAKKYGGSVGSQPPPVAPEPGPVPSSPSQEPPTKREYDQCRIQVRLPDGTSLTQTFRAREQLAAVRLYVELHRGEELGGGQDPVQLLSGFPRRAFSEADMERPLQELGLVPSAVLIVAKKCPS

SEQ ID NO: 164 - protein, 354 aa, Homo sapiens
  ref <308>: DATABASE ACCESSION NUMBER: sw_hum/hem6_human
  ref <309>: DATABASE ENTRY DATE: 1994-06-01
MLPKTSGTRATSLGRPEEEEDELAHRCSSFMAPPVTDLGELRRRPGDMKTKMELLILETQAQVCQALAQVDGGANFSVDRWERKEGGGGISCVLQDGCVFEKAGVSISVVHGNLSEEAAKQMRSRGKVLKTKDGKLPFCAMGVSSVTHPKNPHAPTIHFNYRYFEVEEADGHKQWWFGGGCDLTPTYLNQEDAVHFHRTLKEACDQHGPDLYPKFKKWCDDYFFIAHRGERRGIGGIFFDDLDSPSKEEVFRFVQSCARAVVPSYIPLVKKHCDDSFTPQEKLWQQLRRGRYVEFNLLYDRGTKFGLFTPGSRIESILMSLPLTARWEYMHSPSENSKEAEILEVLRHPRDWVR

SEQ ID NO: 165 - protein, 397 aa, Homo sapiens
  ref <308>: DATABASE ACCESSION NUMBER: sw_hum/thim_human
  ref <309>: DATABASE ENTRY DATE: 1995-11-01
MRLLRGVFVVAAKRTPFGAYGGLLKDFTATDLSEFAAKAALSAGKVSPETVDSVIMGNVLQSSSDAIYLARHVGLRVGIPKETPALTINRLCGSGFQSIVNGCQEICVKEAEVVLCGGTESMSQAPYCVRNVRFGTKLGSDIKLEDSLWVSLTDQHVQLPMAMTAENLTVKHKISREECDKYALQSQQRWKAANDAGYFNDEMAPIEVKTKKGKQTMQVDEHARPQTTLEQLQKLPPVFKKDGTVTAGNASGVADGAGAVIIASEDAVKKHNFTPLARIVGYFVSGCDPSIMGIGPVPAISGALKKAGLSLKDMDLVEVNEAFAPQYLAVERSLDLDISKTNVNGGAIALGHPLGGSGSRITAHLVHELRRRGGKYAVGSACIGGGQGIAVIIQSTA

SEQ ID NO: 166 - protein, 550 aa, Homo sapiens
  ref <308>: DATABASE ACCESSION NUMBER: sw_hum/src8_human
  ref <309>: DATABASE ENTRY DATE: 1997-11-01
MWKASAGHAVSIAQDDAGADDWETDPDFVNDVSEKEQRWGAKTVQGSGHQEHINIHKLRENVFQEHQTLKEKELETGPKASHGYGGKFGVEQDRMDKSAVGHEYQSKLSKHCSQVDSVRGFGGKFGVQMDRVDQSAVGFEYQGKTEKHASQKDYSSGFGGKYGVQADRVDKSAVGFDYQGKTEKHESQRDYSKGFGGKYGIDKDKVDKSAVGFEYQGKTEKHESQKDYVKGFGGKFGVQTDRQDKCALGWDHQEKLQLHESQKDYKTGFGGKFGVQSERQDSAAVGFDYKEKLAKHESQQDYSKGFGGKYGVQKDRMDKNASTFEDVTQVSSAYQKTVPVEAVTSKTSNIRANFENLAKEKEQEDRRKAEAERAQRMAKERQEQEEARRKLEEQARAKTQTPPVSPAPQPTEERLPSSPVYEDAASFKAELSYRGPVSGTEPEPVYSMEAADYREASSQQGLAYATEAVYESAEAPGHYPAEDSTYDEYENDLGYTAVALYDYQAAGDDEISFDPDDIITNIEMIDDGWWRGVCKGRYGLFPANYVELRQ

SEQ ID NO: 167 - protein, 223 aa, Homo sapiens
  ref <308>: DATABASE ACCESSION NUMBER: sw_hum/kad4_human
  ref <309>: DATABASE ENTRY DATE: 1992-08-01
MASKLLRAVILGPPGSGKGTVCQRIAQNFGLQHLSSGHFLRENIKASTEVGEMAKQYIEKSLLVPDHVITRLMMSELENRRGQHWLLDGFPRTLGQAEALDKICEVDLVISLNIPFETLKDRLSRRWIHPPSGRVYNLDFNPPHVHGIDDVTGEPLVQQEDDKPEAVAARLRQYKDVAKPVIELYKSRGVLHQFSGTETNKIWPYVYTLFSNKITPIQSKEAY

SEQ ID NO: 168 - protein, 189 aa, Homo sapiens
  ref <308>: DATABASE ACCESSION NUMBER: humangp/chr12-q9nrv9
  ref <309>: DATABASE ENTRY DATE: 2003-04-22
MLGMIKNSLFGSVETWPWQVLSKGDKEEVAYEERACEGGKFATVEVTDKPVDEALREAMPKVAKYAGGTNDKGIGMGMTVPISFAVFPNEDGSLQKKLKVWFRIPNQFQSDPPAPSDKSVKIEEREGITVYSMQFGGYAKEADYVAQATRLRAALEGTATYRGDIYFCTGYDPPMKPYGRRNEIWLLKT

SEQ ID NO: 169 - protein, 1404 aa, Homo sapiens
  ref <308>: DATABASE ACCESSION NUMBER: humangp/chr12-q14221
  ref <309>: DATABASE ENTRY DATE: 2003-04-22
QTPGRVGSQGSDLDSSATPINTVDVNNESSSEGFICPQCMKSLGSADELFKHYEAVHDAGNDSGHGGESNLALKRDDVTLLRQEVQDLQASLKEEKWYSEELKKELEKYQGLQQQEAKPDGLVTDSSAELQSLEQQLEEAQTENFNIKQMKDLFEQKAAQLATEIADIKSKYDEERSLREAAEQKVTRLTEELNKEATVIQDLKTELLQRPGIEDVAVLKKELVQVQTLMDNMTLERERESEKLKDECKKLQSQYASSEATISQLRSELAKGPQEVAVYVQELQKLKSSVNELTQKNQTLTENLLKKEQDYTKLEEKHNEESVSKKNIQATLHQKDLDCQQLQSRLSASETSLHRIHVELSEKGEATQKLKEELSEVETKYQHLKAEFKQLQQQREEKEQHGLQLQSEINQLHSKLLETERQLGEAHGRLKEQRQLSSEKLMDKEQQVADLQLKLSRLEEQLKEKVTNSTELQHQLDKTKQQHQEQQALQQSTTAKLREAQNDLEQVLRQIGDKDQKIQNLEALLQKSKENISLLEKEREDLYAKIQAGEGETAVLNQLQEKNHTLQEQVTQLTEKLKNQSESHKQAQENLHDQVQEQKAHLRAAQDRVLSLETSVNELNSQLNESKEKVSQLDIQIKAKTELLLSAEAAKTAQRADLQNHLDTAQNALQDKQQELNKITTQLDQVTAKLQDKQEHCSQLESHLKEYKEKYLSLEQKTEELEGQIKKLEADSLEVKASKEQALQDLQQQRQLNTDLELRATELSKQLEMEKEIVSSTRLDLQKKSEALESIKQKLTKQEEEKKILKQDFETLSQETKIQHEELNNRIQTTVTELQKVKMEKEALMTELSTVKDKLSKVSDSLKNSKSEFEKENQKGKAAILDLEKTCKELKHQLQVQMENTLKEQKELKKSLEKEKEASHQLKLELNSMQEQLIQAQNTLKQNEKEEQQLQGNINELKQSSEQKKKQIEALQGELKIAVLQKTELENKLQQQLTQAAQELAAEKEKISVLQNNYEKSQETFKQLQSDFYGRESELLATRQDLKSVEEKLSLAQEDLISNRNQIGNQNKLIQELKTAKATLEQDSAKKEQQLQERCKALQDIQKEKSLKEKELVNEKSKLAEIEEIKCRQEKEITKLNEELKSHKLESIKEITNLKDAKQLLIQQKLELQGKADSLKAAVEQEKRNQQILKDQVKKEEEELKKEFIEKEAKLHSEIKEKEVGMKKHEENEAKLTMQITALNENLGTVKKEWQSSQRRVSELEKQTDDLRGEIAVLEATVQNNQDERRALLERCLKGEGEIEKLQTKVLELQRKLDNTTAAVQELGRENQSLQIKHTQALNRKWAEDNEVQNCMACGKGFSVTVRRHHCRQCGNIFCAECSAKNALTPSSKKPVRVCDACFNDLQG

SEQ ID NO: 170 - protein, 376 aa, Homo sapiens
  ref <308>: DATABASE ACCESSION NUMBER: sw_hum/myg1_human
  ref <309>: DATABASE ENTRY DATE: 2001-10-16
MGHRFLRGLLTLLLPPPPLYTRHRMLGPESVPPPKRSRSKLMAPPRIGTHNGTFHCDEALACALLRLLPEYRDAEIVRTRDPEKLASCDIVVDVGGEYDPRRHRYDHHQRSFTETMSSLSPGKPWQTKLSSAGLIYLHFGHKLLAQLLGPSEEDSMVGTLYDKMYENFVEEVDAVDNGISQWAEGEPRYALTTTLSARVARLNPTWNHPDQDTEAGFKRAMDLVQEEFLQRLDFYQHSWLPARALVEEALAQRFQVDPSGEIVELAKGACPWKEHLYHLESGLSPPVAIFFVIYTDQAGQWRIQCVPKEPHSFQSRLPLPEPWRGLRDEALDQVSGIPGCIFVHASGFIGGHPTREGALSMARATLAQRSYLPQIS

SEQ ID NO: 171 - protein, 525 aa, Homo sapiens
  ref <308>: DATABASE ACCESSION NUMBER: sw_hum/mppa_human
  ref <309>: DATABASE ENTRY DATE: 1996-10-01
MAAVVLAATRLLRGSGSWGCSRLRFGPPAYRRFSSGGAYPNIPLSSPLPGVPKPVFATVDGQEKFETKVTTLDNGLRVASQNKFGQFCTVGILINSGSRYEAKYLSGIAHFLEKLAFSSTARFDSKDEILLTLEKHGGICDCQTSRDTTMYAVSADSKGLDTVVALLADVVLQPRLTDEEVEMTRMAVQFELEDLNLRPDPEPLLTEMIHEAAYRENTVGLHRFCPTENVAKINREVLHSYLRNYYTPDRMVLAGVGVEHEHLVDCARKYLLGVQPAWGSAEAVDIDRSVAQYTGGIAKLERDMSNVSLGPTPIPELTHIMVGLESCSFLEEDFIPFAVLNMMMGGGGSFSAGGPGKGMFSRLYLNVLNRHHWMYNATSYHHSYEDTGLLCIHASADPRQVREMVEIITKEFILMGGTVDTVELERAKTQLTSMLMMNLESRPVIFEDVGRQVLATRSRKLPHELCTLIRNVKPEDVKRVASKMLRGKPAVAALGDLTDLPTYEHIQTALSSKDGRLPRTYRLFR

SEQ ID NO: 172 - protein, 422 aa, Homo sapiens
  ref <308>: DATABASE ACCESSION NUMBER: sw_hum/psdb_human
  ref <309>: DATABASE ENTRY DATE: 2003-02-28
MAAAAVVEFQRAQSLLSTDREASIDILHSIVKRDIQENDEEAVQVKEQSILELGSLLAKTGQAAELGGLLKYVRPFLNSISKAKAARLVRSLLDLFLDMEAATGQEVELCLECIEWAKSEKRTFLRQALEARLVSLYFDTKRYQEALHLGSQLLRELKKMDDKALLVEVQLLESKTYHALSNLPKARAALTSARTTANAIYCPPKLQATLDMQSGIIHAAEEKDWKTAYSYFYEAFEGYDSIDSPKAITSLKYMLLCKIMLNTPEDVQALVSGKLALRYAGRQTEALKCVAQASKNRSLADFEKALTDYRAELRDDPIISTHLAKLYDNLLEQNLIRVIEPFSRVQIEHISSLIKLSKADVERKLSQMILDKKFHGILDQGEGVLIIFDEPPVDKTYEAALETIQNMSKVVDSLYNKAKKLT

SEQ ID NO: 173 - protein, 421 aa, Homo sapiens
  ref <308>: DATABASE ACCESSION NUMBER: sw_hum/acdm_human
  ref <309>: DATABASE ENTRY DATE: 1989-07-01
MAAGFGRCCRVLRSISRFHWRSQHTKANRQREPGLGFSFEFTEQQKEFQATARKFAREEIIPVAAEYDKTGEYPVPLIRRAWELGLMNTHIPENCGGLGLGTFDACLISEELAYGCTGVQTAIEGNSLGQMPIIIAGNDQQKKKYLGRMTEEPLMCAYCVTEPGAGSDVAGIKTKAEKKGDEYIINGQKMWITNGGKANWYFLLARSDPDPKAPANKAFTGFIVEADTPGIQIGRKELNMGQRCSDTRGIVFEDVKVPKENVLIGDGAGFKVAMGAFDKTRPVVAAGAVGLAQRALDEATKYALERKTFGKLLVEHQAISFMLAEMAMKVELARMSYQRAAWEVDSGRRNTYYASIAKAFAGDIANQLATDAVQILGGNGFNTEYPVEKLMRDAKIYQIYEGTSQIQRLIVAREHIDKYKN

SEQ ID NO: 174 - protein, 333 aa, Homo sapiens
  ref <308>: DATABASE ACCESSION NUMBER: sw_hum/gipc_human
  ref <309>: DATABASE ENTRY DATE: 2001-10-16
MPLGLGRRKKAPPLVENEEAEPGRGGLGVGEPGPLGGGGSGGPQMGLPPPPPALRPRLVFHTQLAHGSPTGRIEGFTNVKELYGKIAEAFRLPTAEVMFCTLNTHKVDMDKLLGGQIGLEDFIFAHVKGQRKEVEVFKSEDALGLTITDNGAGYAFIKRIKEGSVIDHIHLISVGDMIEAINGQSLLGCRHYEVARLLKELPRGRTFTLKLTEPRKAFDMISQRSAGGRPGSGPQLGTGRGTLRLRSRGPATVEDLPSAFEEKAIEKVDDLLESYMGIRDTELAATMVELGKDKRNPDELAEALDERLGDFAFPDEFVFDVWGAIGDAKVGRY

SEQ ID NO: 175 - protein, 248 aa, Homo sapiens
  ref <308>: DATABASE ACCESSION NUMBER: humangp/chr1-aah15403
  ref <309>: DATABASE ENTRY DATE: 2003-04-22
MAGITTIEAVKRKIQVLQQQADDAEERAERLQREVEGERRAREQAEAEVASLNRRIQLVEEELDRAQERLATALQKLEEAEKAADESERGMKVIENRALKDEEKMELQEIQLKEAKHIAEEADRKYEEVARKLVIIEGDLERTEERAELAESRCREMDEQIRLMDQNLKCLSAAEEKYSQKEDKYEEEIKILTDKLKEAETRAEFAERSVAKLEKTIDDLEDKLKCTKEEHLCTQRMLDQTLLDLNEM

SEQ ID NO: 176 - protein, 423 aa, Homo sapiens
  ref <308>: DATABASE ACCESSION NUMBER: sw_gatm_human
  ref <309>: DATABASE ENTRY DATE: 1996-10-01
MLRVRCLRGGSRGAEAVHYIGSRLGRTLTGWVQRTFQSTQAATASSRNSCAADDKATEPLPKDCPVSSYNEWDPLEEVIVGRAENACVPPFTIEVKANTYEKYWPFYQKQGGHYFPKDHLKKAVAEIEEMCNILKTEGVTVRRPDPIDWSLKYKTPDFESTGLYSAMPRDILIVVGNEIIEAPMAWRSRFFEYRAYRSIIKDYFHRGAKWTTAPKPTMADELYNQDYPIHSVEDRHKLAAQGKFVTTEFEPCFDAADFIRAGRDIFAQRSQVTNYLGIEWMRRHLAPDYRVHIISFKDPNPMHIDATFNIIGPGIVLSNPDRPCHQIDLFKKAGWTIITPPTPIIPDDHPLWMSSKWLSMNVLMLDEKRVMVDANEVPIQKMFEKLGITTIKVNIRNANSLGGGFHCWTCDVRRRGTLQSYLD

SEQ ID NO: 177 - protein, 254 aa, Homo sapiens
  ref <308>: DATABASE ACCESSION NUMBER: sw_hum/pse3_human
  ref <309>: DATABASE ENTRY DATE: 2001-10-16
MASLLKVDQEVKLKVDSFRERITSEAEDLVANFFPKKLLELDSFLKEPILNIHDLTQIHSDMNLPVPDPILLTNSHDGLDGPTYKKRRLDECEEAFQGTKVFVMPNGMLKSNQQLVDIIEKVKPEIRLLIEKCNTVKMWVQLLIPRIEDGNNFGVSIQEETVAELRTVESEAASYLDQISRYYITRAKLVSKIAKYPHVEDYRRTVTEIDEKEYISLRLIISELRNQYVTLHDMILKNIEKIKRPRSSNAETLY

SEQ ID NO: 178 - protein, 315 aa, Homo sapiens
  ref <308>: DATABASE ACCESSION NUMBER: sw_hum/calu_human
  ref <309>: DATABASE ENTRY DATE: 1999-07-15
MDLRQFLMCLSLCTAFALSKPTEKKDRVHHEPQLSDKVHNDAQSFDYDHDAFLGAEEAKTFDQLTPEESKERLGKIVSKIDGDKDGFVTVDELKDWIKFAQKRWIYEDVERQWKGHDLNEDGLVSWEEYKNATYGYVLDDPDPDDGFNYKQMMVRDERRFKMADKDGDLIATKEEFTAFLHPEEYDYMKDIVVQETMEDIDKNADGFIDLEEYIGDMYSHDGNTDEPEWVKTEREQFVEFRDKNRDGKMDKEETKDWILPSDYDHAEAEARHLVYESDQNKDGKLTKEEIVDKYDLFVGSQATDFGEALVRHDEF

SEQ ID NO: 179 - protein, 401 aa, Homo sapiens
  ref <308>: DATABASE ACCESSION NUMBER: sw_hum/dct2_human
  ref <309>: DATABASE ENTRY DATE: 1997-11-01
MADPKYADLPGIARNEPDVYETSDLPEDDQAEFDAEELTSTSVEHIIVNPNAAYDKFKDKRVGTKGLDFSDRIGKTKRTGYESGEYEMLGEGLGVKETPQQKYQRLLHEVQELTTEVEKIKTTVKESATEEKLTPVLLAKQLAALKQQLVASHLEKLLGPDAAINLTDPDGALAKRLLLQLEATKNSKGGSGGKTTGTPPDSSLVTYELHSRPEQDKFSQAAKVAELEKRLTELETAVRCDQDAQNPLSAGLQGACLMETVELLQAKVSALDLAVLDQVEARLQSVLGKVNEIAKHKASVEDADTQSKVHQLYETIQRWSPIASTLPELVQRLVTIKQLHEQAMQFGQLLTHLDTTQQMIANSLKDNTTLLTQVQTTMRENLATVEGNFASIDERMKKLGK

SEQ ID NO: 180 - protein, 261 aa, Homo sapiens
  ref <308>: DATABASE ACCESSION NUMBER: sw_hum/hcd2_human
  ref <309>: DATABASE ENTRY DATE: 1997-11-01
MAAACRSVKGLVAVITGGASGLGLATAERLVGQGASAVLLDLPNSGGEAQAKKLGNNCVFAPADVTSEKDVQTALALAKGKFGRVDVAVNCAGIAVASKTYNLKKGQTHTLEDFQRVLDVNLMGTFNVIRLVAGEMGQNEPDQGGQRGVIINTASVAAFEGQVGQAAYSASKGGIVGMTLPIARDLAPIGIRVMTIAPGLFGTPLLTSLPEKVCNFLASQVPFPSRLGDPAEYAHLVQAIIENPFLNGEVIRLDGAIRMQP

SEQ ID NO: 181 - protein, 312 aa, Homo sapiens
  ref <308>: DATABASE ACCESSION NUMBER: sw_hum/pdxk_human
  ref <309>: DATABASE ENTRY DATE: 1997-11-01
MEEECRVLSIQSHVIRGYVGNRAATFPLQVLGFEIDAVNSVQFSNHTGYAHWKGQVLNSDELQELYEGLRLNNMNKYDYVLTGYTRDKSFLAMVVDIVQELKQQNPRLVYVCDPVLGDKWDGEGSMYVPEDLLPVYKEKVVPLADIITPNQFEAELLSGRKIHSQEEALRVMDMLHSMGPDTVVITSSDLPSPQGSNYLIVLGSQRRRNPAGSVVMERIRMDIRKVDAVFVGTGDLFAAMLLAWTHKHPNNLKVACEKTVSTLHHVLQRTIQCAKAQAGEGVRPSPMQLELRMVQSKRDIEDPEIVVQATVL

SEQ ID NO: 182 - protein, 245 aa, Homo sapiens
  ref <308>: DATABASE ACCESSION NUMBER: sw_hum/if6_human
  ref <309>: DATABASE ENTRY DATE: 1998-07-15
MAVRASFENNCEIGCFAKLTNTYCLVAIGGSENFYSVFEGELSDTIPVVHASIAGCRIIGRMCVGNRHGLLVPNNTTDQELQHIRNSLPDTVQIRRVEERLSALGNVTTCNDYVALVHPDLDRETEEILADVLKVEVFRQTVADQVLVGSYCVFSNQGGLVHPKTSIEDQDELSSLLQVPLVAGTVNRGSEVIAAGMVVNDWCAFCGLDTTSTELSVVESVFKLNEAQPSTIATSMRDSLIDSLT

SEQ ID NO: 183 - protein, 214 aa, Homo sapiens
  ref <308>: DATABASE ACCESSION NUMBER: sw_hum/pdx5_human
  ref <309>: DATABASE ENTRY DATE: 1993-04-01
MGLAGVCALRRSAGYILVGGAGGQSAAAAARRCSEGEWASGGVRSFSRAAAAMAPIKVGDAIPAVEVFEGEPGNKVNLAELFKGKKGVLFGVPGAFTPGCSKTHLPGFVEQAEALKAKGVQVVACLSVNDAFVTGEWGRAHKAEGKVRLLADPTGAFGKETDLLLDDSLVSIFGNRRLKRFSMVVQDGIVKALNVEPDGTGLTCSLAPNIISQL

SEQ ID NO: 184 - protein, 323 aa, Homo sapiens
  ref <308>: DATABASE ACCESSION NUMBER: sw_hum/pp1g_human
  ref <309>: DATABASE ENTRY DATE: 1994-06-01
MADLDKLNIDSIIQRLLEVRGSKPGKNVQLQENEIRGLCLKSREIFLSQPILLELEAPLKICGDIHGQYYDLLRLFEYGGFPPESNYLFLGDYVDRGKQSLETICLLLAYKIKYPENFFLLRGNHECASINRIYGFYDECKRRYNIKLWKTFTDCFNCLPIAAIVDEKIFCCHGGLSPDLQSMEQIRRIMRPTDVPDQGLLCDLLWSDPDKDVLGWGENDRGVSFTFGAEVVAKFLHKHDLDLICRAHQVVEDGYEFFAKRQLVTLFSAPNYCGEFDNAGAMMSVDETLMCSFQILKPAEKKKPNATRPVTPPRGMITKQAKK

SEQ ID NO: 185 - protein, 226 aa, Homo sapiens
  ref <308>: DATABASE ACCESSION NUMBER: sw_hum/pimt_human
  ref <309>: DATABASE ENTRY DATE: 1991-08-01
AWKSGGASHSELIHNLRKNGIIKTDKVFEVMLATDRSHYAKCNPYMDSPQSIGFQATISAPHMHAYALELLFDQLHEGAKALDVGSGSGILTACFARMVGCTGKVIGIDHIKELVDDSINNVRKDDPTLLSSGRVQLVVGDGRMGYAEEAPYDAIHVGAAAPVVPQALIDQLKPGGRLILPVGPAGGNQMLEQYDKLQDGSIKMKPLMGVIYVPLTDKEKQWSRWK

SEQ ID NO: 186 - protein, 548 aa, Homo sapiens
  ref <308>: DATABASE ACCESSION NUMBER: sw_hum/tcpq_human
  ref <309>: DATABASE ENTRY DATE: 1996-10-01
MALHVPKAPGFAQMLKEGAKHFSGLEEAVYRNIQACKELAQTTRTAYGPNGMNKMVINHLEKLFVTNDAATILRELEVQHPAAKMIVMASHMQEQEVGDGTNFVLVFAGALLELAEELLRIGLSVSEVIEGYEIACRKAHEILPNLVCCSAKNLRDIDEVSSLLRTSIMSKQYGNEVFLAKLIAQACVSIFPDSGHFNVDNIRVCKILGSGISSSSVLHGMVFKKETEGDVTSVKDAKIAVYSCPFDGMITETKGTVLIKTAEELMNFSKGEENLMDAQVKAIADTGANVVVTGGKVADMALHYANKYNIMLVRLNSKWDLRRLCKTVGATALPRLTPPVLEEMGHCDSVYLSEVGDTQVVVFKHEKEDGAISTIVLRGSTDNLMDDIERAVDDGVNTFKVLTRDKRLVPGGGATEIELAKQITSYGETCPGLEQYAIKKFAEAFEAIPRALAENSGVKANEVISKLYAVHQEGNKNVGLDIEAEVPAVKDMLEAGILDTYLGKYWAIKLATNAAVTVLRVDQIIMAKPAGGPKPPSGKKDWDDDQND

SEQ ID NO: 187 - protein, 51 aa, Homo sapiens
  ref <308>: DATABASE ACCESSION NUMBER: hsugp/333417-11-0
  ref <309>: DATABASE ENTRY DATE: 2002-02-16
SRFKIVMVVLYGNTAVIHPMCAIDEYAMIFRSWVWFSPPHPPIKIDNMAIV

SEQ ID NO: 188 - protein, 205 aa, Homo sapiens
  ref <308>: DATABASE ACCESSION NUMBER: sw_hum/psb3_human
  ref <309>: DATABASE ENTRY DATE: 1993-07-01
MSIMSYNGGAVMAMKGKNCVAIAADRRFGIQAQMVTTDFQKIFPMGDRLYIGLAGLATDVQTVAQRLKFRLNLYELKEGRQIKPYTLMSMVANLLYEKRFGPYYTEPVIAGLDPKTFKPFICSLDLIGCPMVTDDFVVSGTCAEQMYGMCESLWEPNMDPDHLFETISQAMLNAVDRDAVSGMGVIVHIIEKDKITTRTLKARMD

SEQ ID NO: 189 - protein, 397 aa, Homo sapiens
  ref <308>: DATABASE ACCESSION NUMBER: humangp/chr6-q8tdm4
  ref <309>: DATABASE ENTRY DATE: 2003-04-22
MNAGSDPVVIVSAARTIIGSFNGALAAVPVQDLGSTVIKEVLKRATVAPEDVSEVIFGHVLAAGCGQNPVRQASVGAGIPYSVPAWSCQMICGSGLKAVCLAVQSIGIGDSSIVVAGGMENMSKAPHLAYLRTGVKIGEMPLTDSILCDGLTDAFHNCHMGITAENVAKKWQVSREDQDKVAVLSQNRTENAQKAGHFDKEIVPVLVSTRKGLIEVKTDEFPRHGSNIEAMSKLKPYFLTDGTGTVTPANASGINDGAAAVVLMKKSEADKRGLTPLARIVSWSQVGVEPSIMGIGPIPAIKQAVTKAGWSLEDVDIFEINEAFAAVSAAIVKELGLNPEKVNIEGGAIALGHPLGASGCRILVTLLHTLERMGRSRGVAALCIGGGMGIAMCVQRE

SEQ ID NO: 190 - protein, 296 aa, Homo sapiens
  ref <308>: DATABASE ACCESSION NUMBER: sw_hum/biea_human
  ref <309>: DATABASE ENTRY DATE: 1996-10-01
MNAEPERKFGVVVVGVGRAGSVRMRDLRNPHPSSAFLNLIGFVSRRELGSIDGVQQISLEDALSSQEVEVAYICSESSSHEDYIRQFLNAGKHVLVEYPMTLSLAAAQELWELAEQKGKVLHEEHVELLMEEFAFLKKEVVGKDLLKGSLLFTAGPLEEERFGFPAFSGISRLTWLVSLFGELSLVSATLEERKEDQYMKMTVCLETEKKSPLSWIEEKGPGLKRNRYLSFHFKSGSLENVPNVGVNKNIFLKDQNIFVQKLLGQFSEKELAAEKKRILHCLGLAEEIQKYCCSRK

SEQ ID NO: 191 - protein, 216 aa, Homo sapiens
  ref <308>: DATABASE ACCESSION NUMBER: sw_hum/ran_human
  ref <309>: DATABASE ENTRY DATE: 1990-08-01
MAAQGEPQVQFKLVLVGDGGTGKTTFVKRHLTGEFEKKYVATLGVEVHPLVFHTNRGPIKFNVWDTAGQEKFGGLRDGYYIQAQCAIIMFDVTSRVTYKNVPNWHRDLVRVCENIPIVLCGNKVDIKDRKVKAKSIVFHRKKNLQYYDISAKSNYNFEKPFLWLARKLIGDPNLEFVAMPALAPPEVVMDPALAAQYEHDLEVAQTTALPDEDDDL

SEQ ID NO: 192 - protein, 406 aa, Homo sapiens
  ref <308>: DATABASE ACCESSION NUMBER: sw_hum/prs8_human
  ref <309>: DATABASE ENTRY DATE: 1996-02-01
MALDGPEQMELEEGKAGSGLRQYYLSKIEELQLIVNDKSQNLRRLQAQRNELNAKVRLLREELQLLQEQGSYVGEVVRAMDKKKVLVKVHPEGKFVVDVDKNIDINDVTPNCRVALRNDSYTLHKILPNKVDPLVSLMMVEKVPDSTYEMIGGLDKQIKEIKEVIELPVKHPELFEALGIAQPKGVLLYGPPGTGKTLLARAVAHHTDCTFIRVSGSELVQKFIGEGARMVRELFVMAREHAPSIIFMDEIDSIGSSRLEGGSGGDSEVQRTMLELLNQLDGFEATKNIKVIMATNRIDILDSALLRPGRIDRKIEFPPPNEEARLDILKIHSRKMNLTRGINLRKIAELMPGASGAEVKGVCTEAGMYALRERRVHVTQEDFEMAVAKVMQKDSEKNMSIKKLWK

SEQ ID NO: 193 - protein, 189 aa, Homo sapiens
  ref <308>: DATABASE ACCESSION NUMBER: humangp/chr1-014805
  ref <309>: DATABASE ENTRY DATE: 2003-04-22
MASKRALVILAKGAEEMETVIPVDVMRRAGIKVTVAGLAGKDPVQCSRDVVICPDASLEDAKKEGPYDVVVLPGGNLGAQNLSESAAVKEILKEQENRKGLIAAICAGPTALLAHEIGFGSKVTTHPLAKDKMMNGGHYTYSENRVEKDGLILTSRGPGTSFEFALAIVEALNGKEVAAQVKAPLVLKD

SEQ ID NO: 194 - protein, 246 aa, Homo sapiens
  ref <308>: DATABASE ACCESSION NUMBER: sw_hum/psa6_human
  ref <309>: DATABASE ENTRY DATE: 1994-02-01
MSRGSSAGFDRHITIFSPEGRLYQVEYAFKAINQGGLTSVAVRGKDCAVIVTQKKVPDKLLDSSTVTHLFKITENIGCVMTGMTADSRSQVQRARYEAANWKYKYGYEIPVDMLCKRIADISQVYTQNAEMRPLGCCMILIGIDEEQGPQVYKCDPAGYYCGFKATAAGVKQTESTSFLEKKVKKKFDWTFEQTVETAITCLSTVLSIDFKPSEIEVGVVTVENPKFRILTEAEIDAHLVALAERD

SEQ ID NO: 195 - protein, 258 aa, Homo sapiens
  ref <308>: DATABASE ACCESSION NUMBER: sw_hum/6pgl_human
  ref <309>: DATABASE ENTRY DATE: 2000-05-30
MAAPAPGLISVFSSSQELGAALAQLVAQRAACCLAGARARFALGLSGGSLVSMLARELPAAVAPAGPASLARWTLGFCDERLVPFDHAESTYGLYRTHLLSRLPIPESQVITINPELPVEEAAEDYAKKLRQAFQGDSIPVFDLLILGVGPDGHTCSLFPDHPLLQEREKIVAPISDSPKPPPQRVTLTLPVLNAARTVIFVATGEGKAAVLKRILEDQEENPLPAALVQPHTGKLCWFLDEAAARLLTVPFEKHSTL

SEQ ID NO: 196 - protein, 310 aa, Homo sapiens
  ref <308>: DATABASE ACCESSION NUMBER: humangp/chr19-q8wvx0
  ref <309>: DATABASE ENTRY DATE: 2003-04-22
LTGSNYPGLSISLRLTGSSAQEEASGVALGEAPDHSYESLRVTSAQKHVLHVQLNRPNKRNAMNKVFWREMVECFNKISRDADCRAVVISGAGKMFTAGIDLMDMASDILQPKGDDVARISWYLRDIITRYQETFNVIERCPKPVIAAVHGGCIGGGVDLVTACDIRYCAQDAFFQVKEVDVGLAADVGTLQRLPKVIGNQSLVNELAFTARKMMADEALGSGLVSRVFPDKEVMLDAALALAAEISSKSPVAVQSTKVNLLYSRDHSVAESLNYVASWNMSMLQTQDLVKSVQATTENKELKTVTFSKL

SEQ ID NO: 197 - protein, 780 aa, Homo sapiens
  ref <308>: DATABASE ACCESSION NUMBER: sw_hum/acon_human
  ref <309>: DATABASE ENTRY DATE: 1997-11-01
MAPYSLLVTRLQKALGVRQYHVASVLCQRAKVAMSHFEPNEYIHYDLLEKNINIVRKRLNRPLTLSEKIVYGHLDDPASQEIERGKSYLRLRPDRVAMQDATAQMAMLQFISSGLSKVAVPSTIHCDHLIEAQVGGEKDLRRAKDINQEVYNFLATAGAKYGVGFWKPGSGIIHQIILENYAYPGVLLIGTDSHTPNGGGLGGICIGVGGADAVDVMAGIPWELKCPKVIGVKLTGSLSGWSSPKDVILKVAGILTVKGGTGAIVEYHGPGVDSISCTGMATICNMGAEIGATTSVFPYNHRMKKYLSKTGREDIANLADEFKDHLVPDPGCHYDQLIEINLSELKPHINGPFTPDLAHPVAEVGKVAEKEGWPLDIRVGLIGSCTNSSYEDMGRSAAVAKQALAHGLKCKSQFTITPGSEQIRATIERDGYAQILRDLGGIVLANACGPCIGQWDRKDIKKGEKNTIVTSYNRNFTGRNDANPETHAFVTSPEIVTALAIAGTLKFNPETDYLTGTDGKKFRLEAPDADELPKGEFDPGQDTYQHPPKDSSGQHVDVSPTSQRLQLLEPFDKWDGKDLEDLQILIKVKGKCTTDHISAAGPWLKFRGHLDNISNNLLIGAINIENGKANSVRNAVTQEFGPVPDTARYYKKHGIRWVVIGDENYGEGSSREHAALEPRHLGGRAIITKSFARIHETNLKKQGLLPLTFADPADYNKIHPVDKLTIQGLKDFTPGKPLKCIIKHPNGTQETILLNHTFNETQIEWFRAGSALNRMKELQQ

SEQ ID NO: 198 - protein, 480 aa, Homo sapiens
  ref <308>: DATABASE ACCESSION NUMBER: sw_hum/ucr1_human
  ref <309>: DATABASE ENTRY DATE: 1993-07-01
MAASVVCRAATAGAQVLLRARRSPALLRTPALRSTATFAQALQFVPETQVSLLDNGLRVASEQSSQPTCTVGVWIDVGSRFETEKNNGAGYFLEHLAFKGTKNRPGSALEKEVESMGAHLNAYSTREHTAYYIKALSKDLPKAVELLGDIVQNCSLEDSQIEKERDVILREMQENDASMRDVVFNYLHATAFQGTPLAQAVEGPSENVRKLSRADLTEYLSTHYKAPRMVLAAAGGVEHQQLLDLAQKHLGGIPWTYAEDAVPTLTPCRFTGSEIRHRDDALPFAHVAIAVEGPGWASPDSVALQVANAIIGHYDCTYGGGVHLSSPLASGAVANKLCQSFQTFSICYAETGLLGAHFVCDRMKIDDMMFVLQGQWMRLCTSATESEVARGKNILRNALVSHLDGTTPVCEDIGRSLLTYGRRIPLAEWESRIAEVDASVVREICSKYIYDQCPAVAGYGPIEQLPDYNRIRSGMFWLRF

SEQ ID NO: 199 - protein, 205 aa, Homo sapiens
  ref <308>: DATABASE ACCESSION NUMBER: sw_hum/hs27_human
  ref <309>: DATABASE ENTRY DATE: 1987-08-13
MTERRVPFSLLRGPSWDPFRDWYPHSRLFDQAFGLPRLPEEWSQWLGGSSWPGYVRPLPPAAIESPAVAAPAYSRALSRQLSSGVSEIRHTADRWRVSLDVNHFAPDELTVKTKDGVVEITGKHEERQDEHGYISRCFTRKYTLPPGVDPTQVSSSLSPEGTLTVEAPMPKLATQSNEITIPVTFESRAQLGGPEAAKSDETAAK
